(19) United States
(12) Patent Application Publication
(10) Pub. No.: US 2023/0235004 A1
(43) Pub. Date: Jul. 27, 2023

(54) TISSUE TARGETED IMMUNOTOLERANCE WITH PD-1 AGONISTS OR IL-2 MUTEINS

(71) Applicant: PANDION OPERATIONS, INC., Watertown, MA (US)

(72) Inventors: Joanne L. VINEY, Belmont, MA (US); Nathan HIGGINSON-SCOTT, Hingham, MA (US); Kevin OTIPOBY, Ashland, MA (US); Daniel RIOS, Watertown, MA (US); Susmita BORTHAKUR, Watertown, MA (US); Salvatore ALIOTO, Cambridge, MA (US); Lindsay EDWARDS, Cambridge, MA (US)

(73) Assignee: PANDION OPERATIONS, INC., Watertown, MA (US)

(21) Appl. No.: 17/798,774

(22) PCT Filed: Feb. 19, 2021
(86) PCT No.: PCT/US21/18698

§ 371 Date: Aug. 10, 2022

Related U.S. Application Data
(60) Provisional application No. 62/979,859, filed on Feb. 21, 2020.
(60) Provisional application No. 63/092,575, filed on Oct. 16, 2020.

(51) Int. Cl. C07K 14/55; C07K 16/28; A61P 37/06

(52) U.S. Cl. CPC C07K 14/55; C07K 16/28; A61P 37/06; C07K 2319/036; C07K 2319/33; A61K 38/00

(57) ABSTRACT

Methods and compounds for conferring site-specific or local immune privilege.

### CROSS-REFERENCE TO RELATED APPLICATIONS

[0001] This application is a 371 national stage of PCT/US2021/018698 filed Feb. 21, 2021, which claims priority to U.S. Provisional Application No. 62/979,859, filed Feb. 21, 2020, and U.S. Provisional Application No. 63/092,575 filed Oct. 16, 2020, which is hereby incorporated by reference in its entirety.

[0002] This application is related to U.S. Provisional Application No. 62/888,694, filed Aug. 19, 2020, U.S. Provisional Application No. 62/850,172, filed May 20, 2019, U.S. Provisional Application No. 62/721,644, filed Aug. 23, 2018, U.S. provisional Application No. 62/675,972 filed May 24, 2018, U.S. provisional Application No. 62/595,357 filed Dec. 6, 2017, U.S. Provisional Application No. 62/595,348, filed Dec. 6, 2017, U.S. Non-Provisional application Ser. No. 16/109,875, filed Aug. 23, 2018, U.S. Non-Provisional application Ser. No. 16/109,897, filed Aug. 23, 2018, U.S. Non-Provisional application Ser. No. 15/988,311, filed May 24, 2018, PCT Application No. PCT/US2018/034334, filed May 24, 2018, and, PCT/US2018/062780, filed Nov. 28, 2018, each of which are hereby incorporated by reference in their entirety.

### REFERENCE TO SEQUENCE LISTING SUBMITTED ELECTRONICALLY

[0003] The sequence listing of the present application is submitted electronically via 10 EFS-Web as an ASCII formatted sequence listing with a file name “25293USPCT-SEQLIST-8apr.2021.txt”, creation date of Apr. 8, 2021, and a size of 625 Kb. This sequence listing submitted via EFS-Web is part of the specification and is herein incorporated by reference in its entirety.

### FIELD

[0004] The embodiments provided herein relate to, for example, methods and compositions for local or targeted immune-privilege.

### BACKGROUND

[0005] Instances of unwanted immune responses, e.g., as in the rejection of transplanted tissue or in autoimmune disorders, constitute a major health problem for millions of people across the world. Long-term outcomes for organ transplantation are frequently characterized by chronic rejection, and eventual failure of the transplanted organ. More than twenty autoimmune disorders are known, affecting essentially every organ of the body, and affecting over fifty million people in North America alone. The broadly active immunosuppressive medications used to combat the pathogenic immune response in both scenarios have serious side effects.

### SUMMARY

[0006] Disclosed herein are methods and therapeutic compounds that provide site-specific immune privilege. Embodiments disclosed herein are incorporated by reference into this section.

[0007] In some embodiments, the therapeutic compound comprises an engineered multi-specific compound, e.g., an engineered bispecific molecule, e.g., an engineered bispecific antibody molecule, comprising:

[0008] 1) a specific targeting moiety selected from:

[0009] a) a donor specific targeting moiety which, e.g., preferentially binds a donor target (preferentially as compared with binding to a recipient antigen), and is useful for providing site-specific immune privilege for a transplant tissue, e.g., an organ, from a donor; or

[0010] b) a tissue specific targeting moiety which, e.g., preferentially binds a subject target tissue (preferentially as compared with subject non-target tissue), and is useful for providing site-specific immune privilege for a subject tissue undergoing unwanted immune attack, e.g., in an autoimmune disorder; and

[0011] 2) an effector binding/modulating moiety selected from:

[0012] (a) an immune cell inhibitory molecule binding/modulating moiety (referred to herein as an ICIM binding/modulating moiety);

[0013] (b) an immunosuppressive immune cell binding/modulating moiety (referred to herein as an IIC binding/modulating moiety);

[0014] (c) an effector binding/modulating moiety that, as part of a therapeutic compound, promotes an immunosuppressive local microenvironment, e.g., by providing in the proximity of the target, a substance that inhibits or minimizes attack by the immune system of the target (referred to herein as an SM binding/modulating moiety); or

[0015] (d) an immune cell stimulatory molecule binding/modulating moiety (referred to herein as an ICSM binding/modulating moiety), wherein the ICSM inhibits immune activation by, for example, blocking the interaction between a costimulatory molecule and its counterstructure.

[0016] An effector binding/modulating moiety can fall into more than one of classes a, b and c. E.g., as is shown below, a CTLA-4 binding molecule falls into both of categories a and b.

[0017] In some embodiments, the therapeutic compound comprises an ICIM binding/modulating moiety. In some embodiments, an ICIM binding/modulating molecule and binds, and agonizes, an inhibitory molecule, e.g., an inhibitory immune checkpoint molecule, or otherwise inhibits or reduces the activity of an immune cell, e.g., a cytotoxic T cell, a B cell, NK cell, or a myeloid cell, e.g., a neutrophil or macrophage.

[0018] In some embodiments, the therapeutic compound comprises an engineered multi-specific compound, e.g., an engineered bispecific molecule, e.g., an engineered bispecific antibody molecule, comprising:

[0019] 1) a specific targeting moiety, e.g., a donor specific targeting moiety (which binds a donor target and is useful for providing site-specific immune privilege for a transplant tissue, e.g., an organ, from a donor) or a tissue specific targeting moiety (which binds a subject tissue target and is useful for providing site-specific immune privilege for a subject tissue undergoing unwanted immune attack, e.g., in an autoimmune disorder); and

[0020] 2) an effector binding/modulating moiety comprising an ICIM binding/modulating moiety that binds to an effector molecule on an immune cell, e.g., an inhibitory receptor, e.g., PD-1, wherein, upon binding of the specific targeting moiety to its target, and binding of the ICIM binding/modulating moiety to an effector molecule on the immune cell, an immune cell activity, e.g., the ability of the immune cell to mount an immune attack, is down regulated, e.g., through an inhibitory signal dependent on the clustering of effector molecules on the immune cell. In some embodiments, the engineered multi-specific compound comprises additional binding moieties so that it binds more than two specific molecules, such as, but not limited to, 3 or 4.

[0021] In some embodiments, the therapeutic compound comprises an ICIM binding/modulating moiety and has one or both of the following properties: (a) the level of down regulation of an immune cell is greater when the therapeutic compound is bound to its target than when the therapeutic compound is not bound to its target; and (b) the therapeutic compound, when engaged with a cell surface inhibitory receptor, e.g., PD-1, on an immune cell, does not inhibit, or does not substantially inhibit the ability of the cell surface inhibitory receptor to bind an endogenous ligand.

[0022] In some embodiments, the level of down regulation of an immune cell is greater when the therapeutic compound is bound to its target than when the therapeutic compound is not bound to its target. In embodiments, the level of down regulation by target bound therapeutic compound is equal to or 1.5-fold, 2-fold, 4-fold, 8-fold or 10-fold greater than what is seen when it is not bound to its target. In embodiments, therapeutic compound does not, or does not significantly down regulate immune cells when it is not bound to target. Thus, indiscriminant or unwanted agonism of an inhibitory receptor, e.g., PD-1, is minimized or eliminated. E.g., when the therapeutic compound is bound to an immune cell, but not bound to the targeted moiety, engagement of a inhibitory immune checkpoint molecule by the therapeutic compound does not result in down regulation or does not result in substantial down regulation, e.g., the inhibitory receptor on the immune cell to which the therapeutic compound is bound, is not clustered or not clustered sufficiently to result in an inhibitory signal sufficient to give down regulation or substantial inhibition of the immune cell.

[0023] In embodiments, the therapeutic compound, when engaged with a cell surface inhibitory receptor, e.g., PD-1, on an immune cell, does not inhibit, or does not substantially inhibit the ability of the cell surface inhibitory receptor to bind an endogenous ligand. In some embodiments, the therapeutic compound can bind to the PD-L1/2 binding site on PD-1. Thus, indiscriminant or unwanted antagonism of an inhibitory receptor, e.g., PD-1, is minimized or eliminated. In embodiments, binding of the therapeutic compound to an inhibitory receptor, e.g. PD-1, on an immune cell does not impede, or substantially impede, the ability of the inhibitory receptor to bind a natural ligand, e.g., PD-L1. In embodiments, binding of the therapeutic compound to an inhibitory receptor, e.g. PD-1, on an immune cell reduces binding of a natural ligand, e.g., PD-L1, by less than 50, 40, 30, 20, 10, or 5% of what is seen in the absence of therapeutic compound. In some embodiments, the moiety is an antibody that binds to PD-1. In some embodiments, the antibody is a PD-1 agonist. In some embodiments, the antibody is not a PD-1 antagonist in a soluble PD-1 antagonist assay.

[0024] In some embodiments, the therapeutic compound comprises an ICIM binding/modulating moiety and, when administered to a subject at a therapeutically effective dose, does not result in unacceptable levels of systemic immune suppression, as would be possible if indiscriminant agonism of the inhibitory receptor in all immune cells of a type, e.g., all T cells, occurred, or unacceptable levels of systemic immune activation, as would be possible if the therapeutic compound antagonized the interaction of the inhibitory receptor with its natural ligand.

[0025] While not wishing to be bound by theory, it is believed that, upon administration to a subject, a therapeutic compound comprising an ICIM binding/modulating moiety can exist in any one of four states: i) unbound and in free solution; ii) bound to only an inhibitory receptor expressed on the surface of an immune cell, e.g., a T cell, through the ICIM binding/modulating moiety; iii) bound to only the surface of the target transplant or subject tissue through the targeting moiety; and iv) bound to both the surface of target transplant or subject tissue through the targeting moiety and to an inhibitory receptor expressed by an immune cell, e.g., a T cell, through the ICIM binding/modulating moiety. When the therapeutic compound is bound only to the target transplant or subject tissue through the targeting moiety (iii), it has no, or no substantial, effect on the target transplant or tissue. When the therapeutic compound is bound to the target transplant or tissue through the targeting moiety and bound to an inhibitory receptor expressed by an immune cell, e.g., a T cell, through the ICIM binding/modulating moiety (iv), it creates immune privilege at the target organ or tissue. While not wishing to be bound by theory, is believed that this is achieved by the target transplant or donor tissue multimerizing the therapeutic compound molecules on its surface, e.g., by immobilizing a plurality of therapeutic compound molecules at a high density and valency. The multimerization of the therapeutic compound molecules allows the ICIM binding/modulating moieties of the therapeutic compounds to promote clustering of inhibitory receptors expressed on the surface of the immune cell, e.g., a pathogenic T cell, and transmission of an inhibitory signal functioning to silence or down regulate the immune cell. E.g., in the case of T cells, a therapeutic compound comprising an ICIM binding/modulating moiety comprising a PD-L1 molecule, or an anti-PD-1 Ab (e.g. agonist anti-PD-1 Ab), can be used. Binding of a plurality of the therapeutic compound molecules to the target results in multimerization of the therapeutic compound molecules, which in turn, by virtue of the PD-L1 molecule, or a functional anti-PD-1 antibody molecule, leads to clustering of PD-1 on the T cell. If that clustering occurs in the context of antigen presentation by the target MEW, to T cell receptor on the T cell, a negative signal is generated and the T cell will be inactivated. In embodiments the ICIM binding/modulating moiety, e.g., a functional antibody molecule, binds the effector molecule but does not inhibit, or substantially inhibit, interaction of the effector molecule with its native ligand(s).

[0026] In some embodiments, the therapeutic compound comprises an IIC binding/modulating moiety, which binds and recruits an immune suppressive immune cell, e.g., a Treg, e.g., a Foxp3+CD25+ Treg, to the proximity of the target tissue.

[0027] In some embodiments, the therapeutic compound comprises a SM binding/modulating moiety, which modulates, e.g., binds and inhibits, sequesters, degrades or otherwise neutralizes a substance, e.g., a soluble molecule that modulates an immune response, e.g., ATP or AMP.

[0028] In some embodiments, the therapeutic compound comprises a targeting moiety that is specific for a target on an immune cell or target cell to be effected by an immune cell. In some embodiments, the target is as described herein. In some embodiments, the target is desmoglein 1, 2, 3, or 4. In some embodiments, the targeting moiety is an antibody that binds to desmoglein 1, 2, 3, or 4.

[0029] In some embodiments the therapeutic compound comprises an ICSM binding/modulating moiety, which binds a stimulatory molecule, e.g., a costimulatory molecule. In some embodiments, the ICSM inhibits the costimulatory molecule counterstructure.

[0030] Binding/modulating either the costimulatory molecule or the costimulatory molecule counterstructure can serve to down regulate the ability of an immune cell to mount an immune response. In some embodiments, the ICSM binding/modulating moiety can bind a stimulatory, e.g., costimulatory molecule on an immune cell, e.g., OX40 on T cells, or the counter member of the stimulatory molecule e.g. OX40L on another cell, such as, but not limited to, immune cells such as NK cells, mast cells, dendritic cells, or, for example, non-immune cells such as endothelial cells, or smooth muscle cells.

[0031] In some embodiments, the therapeutic compound comprises a donor specific targeting moiety and provides site-specific immune privilege for donor transplant tissue implanted in a subject. In some embodiments, the therapeutic compound comprises a tissue specific targeting moiety and provides site-specific immune privilege for a tissue of a subject, e.g., a tissue afflicted with an unwanted immune response in an autoimmune disorder.

[0032] The targeting moiety is specific for the donor transplant or subject tissue to be protected from the immune system. In some embodiments, the effector molecule binding moiety comprises a de novo generated binding domain, e.g. a functional antibody molecule. In some embodiments, the effector binding/modulating moiety comprises amino acid sequence deriving from the natural ligand that recognizes an inhibitory receptor expressed on the surface of an immune cell, e.g., a T cell.

[0033] In some embodiments, the therapeutic compound silences immune cells, e.g., T cells, proximal to the transplant or donor tissue to be protected but does not silence immune cells, e.g., T cells, not proximal to the target, as the therapeutic compound requires the presence of the target transplant or donor tissue for function. This in contrast to when the therapeutic compound binds only to the inhibitory receptor expressed by the immune cell, e.g., T cell, in which case there is no functional consequence.

[0034] Methods and therapeutic compounds described here are based at least in part on providing site-specific immune-privilege. Therapeutic compounds and method of using them described herein allow the minimization, e.g., the reduction or elimination of, non-site-specific systemic administration of immune-suppressive therapeutic agents in clinical settings, e.g., where reversal and suppression of an immune response is desired, such as in autoimmune diseases or tissue, e.g., organ, transplant. While capable of clinically meaningful response when the underlying pathophysiology driven by an aberrant immune system is impacted, broadly acting immunosuppressants have the undesirable effect of reducing the patient's systemic immune system function. As the role of a normally functioning immune system is to combat the constant barrage of pathogenic and opportunistic organisms existing in the surrounding environment and to constantly purge healthy individuals of cancerous cells, patients undergoing chronic immunosuppression are at an increased risk to develop infections and cancer. Methods and therapeutic compounds described herein provide therapies that selectively target and attenuate, reduce, or extinguish only the pathogenic immune response at the site of pathology while having minimal inhibition of normal systemic immune system function elsewhere.

[0035] In some embodiments, a therapeutic compound is provided as provided herein. In some embodiments, the compound comprises a i) a specific targeting moiety selected from: a) a donor specific targeting moiety which, e.g., preferentially binds a donor target; or b) a tissue specific targeting moiety which, e.g., preferentially binds target tissue of a subject; and ii) an effector binding/modulating moiety selected from: (a) an immune cell inhibitory molecule binding/modulating moiety (ICIM binding/modulating moiety); (b) an immunosuppressive immune cell binding/modulating moiety (IIC binding/modulating moiety); or (c) an effector binding/modulating moiety that, as part of a therapeutic compound, promotes an immunosuppressive local microenvironment, e.g., by providing in the proximity of the target, a substance that inhibits or minimizes attack by the immune system of the target (SM binding/modulating moiety).

[0036] In some embodiments, the effector binding/modulating moiety comprises an ICIM binding/modulating moiety. In some embodiments, the effector binding/modulating moiety comprises an ICIM binding/modulating moiety comprising an inhibitory immune checkpoint molecule ligand molecule. In some embodiments, the inhibitory immune molecule counter-ligand molecule comprises a PD-L1 molecule. In some embodiments, the ICIM is wherein the inhibitory immune molecule counter ligand molecule engages a cognate inhibitory immune checkpoint molecule selected from PD-1, KIR2DL4, LILRB1, LILRB, or CTLA-4. In some embodiments, the ICIM is an antibody. In some embodiments, the ICIM comprises an antibody that binds to PD-1, KIR2DL4, LILRB1, LILRB, or CTLA-4. In some embodiments, the ICIM binding/modulating moiety which comprises a functional antibody molecule to a cell surface inhibitory molecule. In some embodiments, the antibody is an anti-PD-1 agonist Ab.

[0037] In some embodiments, the cell surface inhibitory molecule is an inhibitory immune checkpoint molecule. In some embodiments, the inhibitory immune checkpoint molecule is selected from PD-1, KIR2DL4, LILRB1, LILRB2, CTLA-4, or selected from Table 1.

[0038] In some embodiments, the effector binding/modulating moiety comprises an IIC binding/modulating moiety.

[0039] In some embodiments, the compound has the formula from N-terminus to C-terminus: R1---Linker Region A-R2 or R3-Linker Region B-R4, wherein, R1, R2, R3, and R4, each independently comprises an effector binding/modulating moiety, e.g., an ICIM binding/modulating moiety, an IIC binding/modulating moiety, ICSM binding/modulating moiety, or an SM binding/modulating moiety; a specific targeting moiety; or is absent; provided that an effector binding/modulating moiety and a specific targeting moiety are present.

[0040] In some embodiments, polypeptides comprising a targeting moiety that binds to a target cell and an effector binding/modulating moiety, wherein the effector binding/modulating moiety is a IL-2 mutein polypeptide (IL-2 mutein), which is a mutant IL-2 protein, are provided. In some embodiments, the targeting moiety comprises an antibody that binds to a target protein on the surface of a target cell. In some embodiments, the polypeptide comprises two polypeptide chains as provided for herein. In some embodiments, the first chain comprises a VH domain and the second chain comprises a VL domain of an antibody that binds to the target cell or a protein that is expressed on the target cell, such as, but not limited to, desmoglein 1, 2, 3, or 4. In some embodiments, the targeting moiety is an antibody that binds to desmoglein 1, 2, 3, or 4. In some embodiments, the targeting moiety binds to OAT1 (SLC22A6) or OCT2 (SLC22A2). In some embodiments, the targeting moiety is an antibody that binds to OAT1 (SLC22A6) or OCT2 (SLC22A2). In some embodiments, the targeting moiety does not bind to OAT1 (SLC22A6) or OCT2 (SLC22A2). For the avoidance of doubt, the OCT2 referenced herein is not the transcription factor, but rather is the surface protein expressed in kidney tissue. In some embodiments, the targeting moiety is a moiety that specifically binds to a protein found in the pancreas. In some embodiments, the targeting moiety binds to FXYD2, TSPAN7, DPP6, HEPACAM2, TMEM27, or GPR119. In some embodiments, the targeting moiety does not bind to FXYD2, TSPAN7, DPP6, HEPACAM2, TMEM27, or GPR119. In some embodiments, the targeting moiety is antibody that binds to FXYD2, TSPAN7, DPP6, HEPACAM2, TMEM27, or GPR119.

[0041] In some embodiments, the polypeptide comprises a first chain and a second chain that form the polypeptide or therapeutic compound, wherein

[0042] the first chain comprises:

[0043] V_{H}-H_{c}-Linker-C₁, wherein V_{H} is a variable heavy domain that binds to the target cell with a V_{L} domain of the second chain; H_{c} is a heavy chain of antibody comprising CH1-CH2-CH3 domain, the Linker is a glycine/serine amino acid sequence as provided herein or is absent, and C₁ is a IL-2 mutein that can be fused to a Fc protein in either the N-terminal or C-terminal orientation as provided for herein, wherein there can be a glycine/serine linker linking the IL-2 mutein to the Fc protein; and

[0044] the second chain comprises:

[0045] V_{L}-L_{c}, wherein V_{L} is a variable light chain domain that binds to the target cell with the V_{H} domain of the first chain, and the L_{c} domain is a light chain CK domain. In some embodiments, the first chain comprises C₁-Linker-V_{H}-H_{c}, with the variables as defined above.

[0046] In some embodiments, the polypeptide comprises the formula of C₁-linker-CH2-CH3-Linker-scFv, wherein C₁ and the Linker are as defined above and herein, the CH2 and CH3 are heavy chain domains and the scFv is a single chain antibody like fragment that acts as the targeting moiety to bind to tissue targets as provided for herein. In some embodiments, the mutein is fused to the Fc region as provided herein and one or more of the linkers are absent. In some embodiments, the Linker is a glycine/serine linker as provided for herein. In some embodiments, the linker is a peptide sequence.

[0047] In some embodiments, methods of treating autoimmune diseases or conditions are provided herein, the methods comprising administering one or more of the therapeutic compounds or polypeptides provided herein.

[0048] In some embodiments, methods of treating diseases or conditions described herein are provided herein, the methods comprising administering one or more of the therapeutic compounds or polypeptides provided herein.

[0049] In some embodiments, methods of treating a subject with inflammatory bowel disease are provided, the methods comprising administering a therapeutic compound or polypeptides provided herein to the subject to treat the inflammatory bowel disease. In some embodiments, the subject has Crohn's disease or ulcerative colitis.

[0050] In some embodiments, methods of treating a subject with autoimmune hepatitis are provided, the methods comprising administering a therapeutic compound or polypeptides as provided herein to the subject to treat the autoimmune hepatitis.

[0051] In some embodiments, methods of treating primary sclerosing cholangitis are provided, the methods comprising administering a therapeutic compound or polypeptides as provided herein to the subject to treat the primary sclerosing cholangitis.

[0052] In some embodiments, methods of treating (e.g., reducing) inflammation in the intestine are provided, the methods comprising administering a therapeutic compound or polypeptides as provided herein to the subject to treat the inflammation in the intestine. In some embodiments, the inflammation is in the small intestine. In some embodiments, the inflammation is in the large intestine. In some embodiments, the inflammation is in the bowel or colon.

[0053] In some embodiments, methods of treating (e.g., reducing) inflammation in the pancreas are provided, the methods comprising administering a therapeutic compound or polypeptides as provided herein to the subject to treat the inflammation in the pancreas. In some embodiments, the methods treat pancreatitis.

[0054] In some embodiments, methods of treating Type 1 diabetes are provided, the methods comprising administering a therapeutic compound or polypeptides as provided herein to the subject to treat the Type 1 diabetes.

[0055] In some embodiments, methods of treating a transplant subject are provided, the methods comprising administering a therapeutically effective amount of a therapeutic compound or polypeptides as provided herein to the subject, thereby treating a transplant (recipient) subject.

[0056] In some embodiments, methods of treating graft versus host disease (GVHD) in a subject having a transplanted a donor tissue are provided, the methods comprising administering a therapeutically effective amount of a therapeutic compound or polypeptides as provided herein to the subject.

[0057] In some embodiments, methods of treating a subject having, or at risk, or elevated risk, for having, an autoimmune disorder are provided, the methods comprising administering a therapeutically effective amount of a therapeutic compound or polypeptides as provided herein, thereby treating the subject.

[0058] In some embodiments, a polypeptide comprising a skin targeting or an intestine targeting moiety that binds to a target cell and an effector binding/modulating moiety are provided, wherein the effector binding/modulating moiety is a PD-1 agonist or an IL-2 mutein polypeptide (IL-2 mutein), wherein the IL-2 mutein comprises the sequence of SEQ ID NO: 60, wherein at least one of X1, X2, X3, and X4 is I and the remainder are L or I. In some embodiments, the targeting moiety comprises an antibody that binds to a target protein on the surface of the skin cell.

[0059] In some embodiments, the antibody is an antibody that binds to a desmoglein protein.

[0060] In some embodiments, methods of reducing T-cell infiltration in the intestine of a subject in need thereof are provided, the method comprising administering to the subject a polypeptide comprising an intestine targeting tether and an effector molecule. Non-limiting examples of such tethers and effector molecules are provided for herein.

### BRIEF DESCRIPTION OF THE DRAWINGS

[0061] FIG. 1 depicts non-limiting embodiments of the therapeutic compounds provided herein.

[0062] FIG. 2 depicts a non-limiting illustration of how a therapeutic compound provided herein could function.

[0063] FIG. 3 depicts a non-limiting illustration of the therapeutic compounds provided herein.

[0064] FIG. 3A depicts a non-limiting illustration of the therapeutic compounds provided herein.

[0065] FIG. 4 depicts a non-limiting illustration of the therapeutic compounds provided herein.

[0066] FIG. 5 depicts a non-limiting illustration of the therapeutic compounds provided herein.

[0067] FIG. 6 depicts a non-limiting illustration of the therapeutic compounds provided herein.

[0068] FIG. 7 depicts a non-limiting illustration of the therapeutic compounds provided herein.

[0069] FIG. 8 depicts a non-limiting illustration of the therapeutic compounds provided herein.

[0070] FIG. 9 depicts a non-limiting illustration of the therapeutic compounds provided herein.

[0071] FIG. 10 depicts a non-limiting illustration of the therapeutic compounds provided herein.

[0072] FIG. 11 depicts a non-limiting illustration of the therapeutic compounds provided herein.

[0073] FIG. 12 depicts a non-limiting illustration of the therapeutic compounds provided herein.

[0074] FIG. 13 depicts a non-limiting illustration of the therapeutic compounds provided herein.

[0075] FIG. 14 depicts a non-limiting illustration of the therapeutic compounds provided herein.

[0076] FIG. 15 depicts a non-limiting illustration of the therapeutic compounds provided herein.

[0077] FIG. 16 depicts a non-limiting illustration of the therapeutic compounds provided herein.

[0078] FIG. 17 depicts a non-limiting illustration of the therapeutic compounds provided herein.

[0079] FIG. 18 depicts a non-limiting illustration of the therapeutic compounds provided herein.

[0080] FIG. 19 depicts a non-limiting illustration of the therapeutic compounds provided herein.

[0081] FIG. 20 depicts a non-limiting illustration of the therapeutic compounds provided herein.

[0082] FIG. 21 depicts a non-limiting illustration of the therapeutic compounds provided herein.

[0083] FIG. 22 depicts a non-limiting illustration of the therapeutic compounds provided herein.

[0084] FIG. 23 depicts a non-limiting illustration of the therapeutic compounds provided herein.

[0085] FIG. 24 depicts a non-limiting illustration of the therapeutic compounds provided herein.

[0086] 7

### DETAILED DESCRIPTION

[0087] This application incorporates by reference each of the following in its entirety: U.S. application Ser. No. 15/922,592 filed Mar. 15, 2018 and PCT Application No. PCT/US2018/022675, filed Mar. 15, 2018. This application also incorporate by reference, each of the following in their entirety: U.S. Provisional Application No. 62/721,644, filed Aug. 23, 2018, U.S. provisional Application No. 62/675,972 filed May 24, 2018, U.S. provisional Application No. 62/595,357 filed Dec. 6, 2017, U.S. Provisional Application No. 62/595,348, filed Dec. 6, 2017, U.S. Non-Provisional application Ser. No. 16/109,875, filed Aug. 23, 2018, U.S. Non-Provisional application Ser. No. 16/109,897, filed Aug. 23, 2018, U.S. Non-Provisional application Ser. No. 15/988,311, filed May 24, 2018, PCT Application No. PCT/US2018/034334, filed May 24, 2018, and, PCT/US2018/062780, filed Nov. 28, 2018. As used herein and unless otherwise indicated, the term “about” is intended to mean±5% of the value it modifies. Thus, about 100 means 95 to 105.

[0088] As used herein and in the appended claims, the singular forms “a”, “an” and “the” include plural reference unless the context clearly dictates otherwise.

[0089] As used herein, the term “about” means that the numerical value is approximate and small variations would not significantly affect the practice of the disclosed embodiments. Where a numerical limitation is used, unless indicated otherwise by the context, “about” means the numerical value can vary by ±10% and remain within the scope of the disclosed embodiments.

[0090] As used herein, the term “animal” includes, but is not limited to, humans and non-human vertebrates such as wild, domestic, and farm animals.

[0091] As used herein, the term “contacting” means bringing together of two elements in an in vitro system or an in vivo system. For example, “contacting” a therapeutic compound with an individual or patient or cell includes the administration of the compound to an individual or patient, such as a human, as well as, for example, introducing a compound into a sample containing a cellular or purified preparation containing target.

[0092] As used herein, the terms “comprising” (and any form of comprising, such as “comprise”, “comprises”, and “comprised”), “having” (and any form of having, such as “have” and “has”), “including” (and any form of including, such as “includes” and “include”), or “containing” (and any form of containing, such as “contains” and “contain”), are inclusive or open-ended and do not exclude additional, unrecited elements or method steps. Any composition or method that recites the term “comprising” should also be understood to also describe such compositions as consisting, consisting of, or consisting essentially of the recited components or elements.

[0093] As used herein, the term “fused” or “linked” when used in reference to a protein having different domains or heterologous sequences means that the protein domains are part of the same peptide chain that are connected to one another with either peptide bonds or other covalent bonding. The domains or section can be linked or fused directly to one another or another domain or peptide sequence can be between the two domains or sequences and such sequences would still be considered to be fused or linked to one another. In some embodiments, the various domains or proteins provided for herein are linked or fused directly to one another or a linker sequences, such as the glycine/serine sequences described herein link the two domains together.

[0094] As used herein, the term “individual,” “subject,” or “patient,” used interchangeably, means any animal, including mammals, such as mice, rats, other rodents, rabbits, dogs, cats, swine, cattle, sheep, horses, or primates, such as humans.

[0095] As used herein, the term “inhibit” refers to a result, symptom, or activity being reduced as compared to the activity or result in the absence of the compound that is inhibiting the result, symptom, or activity. In some embodiments, the result, symptom, or activity, is inhibited by about, or, at least, 10%, 20%, 30%, 40%, 50%, 60%, 70%, 80%, 90%, 95%, or 99%. An result, symptom, or activity can also be inhibited if it is completely elimination or extinguished.

[0096] As used herein, the phrase “in need thereof” means that the subject has been identified as having a need for the particular method or treatment. In some embodiments, the identification can be by any means of diagnosis. In any of the methods and treatments described herein, the subject can be in need thereof. In some embodiments, the subject is in an environment or will be traveling to an environment in which a particular disease, disorder, or condition is prevalent.

[0097] As used herein, the phrase “integer from X to Y” means any integer that includes the endpoints. For example, the phrase “integer from X to Y” means 1, 2, 3, 4, or 5.

[0098] As used herein, the term “mammal” means a rodent (i.e., a mouse, a rat, or a guinea pig), a monkey, a cat, a dog, a cow, a horse, a pig, or a human. In some embodiments, the mammal is a human.

[0099] In some embodiments, therapeutic compounds are provided herein. In some embodiments, the therapeutic compound is a protein or a polypeptide, that has multiple chains that interact with one another. The polypeptides can interact with one another through non-covalent interactions or covalent interactions, such as through disulfide bonds or other covalent bonds. Therefore, if an embodiment refers to a therapeutic compound it can also be said to refer to a protein or polypeptide as provided for herein and vice versa as the context dictates.

[0100] As used herein, the phrase “ophthalmically acceptable” means having no persistent detrimental effect on the treated eye or the functioning thereof, or on the general health of the subject being treated. However, it will be recognized that transient effects such as minor irritation or a “stinging” sensation are common with topical ophthalmic administration of drugs and the existence of such transient effects is not inconsistent with the composition, formulation, or ingredient (e.g., excipient) in question being “ophthalmically acceptable” as herein defined. In some embodiments, the pharmaceutical compositions can be ophthalmically acceptable or suitable for ophthalmic administration.

[0101] “Specific binding” or “specifically binds to” or is “specific for” a particular antigen, target, or an epitope means binding that is measurably different from a non-specific interaction. Specific binding can be measured, for example, by determining binding of a molecule compared to binding of a control molecule, which generally is a molecule of similar structure that does not have binding activity. For example, specific binding can be determined by competition with a control molecule that is similar to the target.

[0102] Specific binding for a particular antigen, target, or an epitope can be exhibited, for example, by an antibody having a K_{D} for an antigen or epitope of at least about 10^{-4M}, at least about 10^{-5M}, at least about 10^{-6 M}, at least about 10^{-7M}, at least about 10^{-8M}, at least about 10^{-9M}, alternatively at least about 10^{-10 M}, at least about 10^{-11M} at least about 10^{-12M}, or greater, where K_{D} refers to a dissociation rate of a particular antibody-target interaction. Typically, an antibody that specifically binds an antigen or target will have a K_{D} that is, or at least, 2-, 4-, 5-, 10-, 20-, 50-, 100-, 500-, 1000-, 5,000-, 10,000-, or more times greater for a control molecule relative to the antigen or epitope.

[0103] In some embodiments, specific binding for a particular antigen, target, or an epitope can be exhibited, for example, by an antibody having a K_{A} or Kₐ for a target, antigen, or epitope of at least 2-, 4-, 5-, 20-, 50-, 100-, 500-, 1000-, 5,000-, 10,000-or more times greater for the target, antigen, or epitope relative to a control, where K_{A} or Kₐ refers to an association rate of a particular antibody-antigen interaction.

[0104] As provided herein, the therapeutic compounds and compositions can be used in methods of treatment as provided herein. As used herein, the terms “treat,” “treated,” or “treating” mean both therapeutic treatment and prophylactic measures wherein the object is to slow down (lessen) an undesired physiological condition, disorder or disease, or obtain beneficial or desired clinical results. For purposes of these embodiments, beneficial or desired clinical results include, but are not limited to, alleviation of symptoms; diminishment of extent of condition, disorder or disease; stabilized (i.e., not worsening) state of condition, disorder or disease; delay in onset or slowing of condition, disorder or disease progression; amelioration of the condition, disorder or disease state or remission (whether partial or total), whether detectable or undetectable; an amelioration of at least one measurable physical parameter, not necessarily discernible by the patient; or enhancement or improvement of condition, disorder or disease. Treatment includes eliciting a clinically significant response without excessive levels of side effects. Treatment also includes prolonging survival as compared to expected survival if not receiving treatment.

[0105] Provided herein are therapeutic compounds, e.g., therapeutic protein molecules, e.g., fusion proteins, including a targeting moiety and an effector binding/modulating moiety, typically as separate domains. Also provided are methods of using and making the therapeutic compounds. The targeting moiety serves to localize the therapeutic compound, and thus the effector binding/modulating moiety, to a site at which immune-privilege is desired. The effector binding/modulating moiety comprises one or more of: (a) an immune cell inhibitory molecule binding/modulating moiety (an ICIM binding/modulating moiety); (b) an immunosuppressive immune cell binding/modulating moiety (an IIC binding/modulating moiety); (c) a soluble molecule binding/modulating moiety (a SM binding/modulating moiety); or (d) a molecule that blocks or inhibits immune cell stimulatory molecule binding/modulating moiety (referred to herein as an ICSM binding/modulating moiety). In some embodiments, the ICSM inhibits immune activation by, for example, blocking the interaction between a costimulatory molecule and its counterstructure. In some embodiments, a therapeutic compound comprises: (a) and (b); (a) and (c); (a) and (d); (b) and (c); (b) and (d); (c) and (d); or (a), (b), (c), and (d).

[0106] The present disclosure provides, for example, molecules that can act as PD-1 agonists. In some embodiments, the agonist is an antibody that binds to PD-1. Without being bound to any particular theory, agonism of PD-1 inhibits T cell activation/signaling and can be accomplished by different mechanisms. For example cross-linking can lead to agonism, bead-bound, functional PD-1 agonists have been described (Akkaya. Ph.D. Thesis: Modulation of the PD-1 pathway by inhibitory antibody superagonists. Christ Church College, Oxford, U K, 2012), which is hereby incorporated by reference. Crosslinking of PD-1 with two mAbs that bind non-overlapping epitopes induces PD-1 signaling (Davis, US 2011/0171220), which is hereby incorporated by reference. Another example is illustrated through the use of a goat anti-PD-1 antiserum (e.g. AF1086, R&D Systems) which is hereby incorporated by reference, which acts as an agonist when soluble (Said et al., 2010, Nat Med) which is hereby incorporated by reference. Non-limiting examples of PD-1 agonists that can be used in the present embodiments include, but are not limited to, UCB clone 19 or clone 10, PD1AB-1, PD1AB-2, PD1AB-3, PD1AB-4 and PD1AB-5, PD1AB-6 (Anaptys/Celgene), PD1-17, PD1-28, PD1-33 and PD1-35 (Collins et al, US 2008/0311117 A1), antibodies against PD-1 and uses therefor, which is hereby incorporated by reference, or can be a bispecific, monovalent anti-PD-1/anti-CD3 (Ono), and the like. In some embodiments, the PD-1 agonist antibodies can be antibodies that block binding of PD-L1 to PD-1. In some embodiments, the PD-1 agonist antibodies can be antibodies that do not block binding of PD-L1 to PD-1. In some embodiments, the antibody does not act as an antagonist of PD-1.

[0107] PD-1 agonism can be measured by any method, such as the methods described in the examples. For example, cells can be constructed that express, including stably express, constructs that include a human PD-1 polypeptide fused to a beta-galactosidase “Enzyme donor” and 2) a SHP-2 polypeptide fused to a beta-galactosidase “Enzyme acceptor.” Without being bound by any theory, when PD-1 is engaged, SHP-2 is recruited to PD-1. The enzyme acceptor and enzyme donor form a fully active beta-galactosidase enzyme that can be assayed. Although, the assay does not directly show PD-1 agonism, but shows activation of PD-1 signaling. PD-1 agonism can also be measured by measuring inhibition of T cell activation because, without being bound to any theory, PD-1 agonism inhibits anti-CD3-induced T cell activation. For example, PD-1 agonism can be measured by preactivating T cells with PHA (for human T cells) or ConA (for mouse T cells) so that they express PD-1. The cells can then be reactivated with anti-CD3 in the presence of anti-PD-1 (or PD-L1) for the PD-1 agonism assay. T cells that receive a PD-1 agonist signal in the presence of anti-CD3 will show decreased activation, relative to anti-CD3 stimulation alone. Activation can be readout by proliferation or cytokine production (IL-2, IFNg, IL-17) or other markers, such as CD69 activation marker. Thus, PD-1 agonism can be measured by either cytokine production or cell proliferation. Other methods can also be used to measure PD-1 agonism.

[0108] PD-1 is Ig superfamily member expressed on activated T cells and other immune cells. The natural ligands for PD-1 appear to be PD-L1 and PD-L2. Without being bound to any particular theory, when PD-L1 or PD-L2 bind to PD-1 on an activated T cell, an inhibitory signaling cascade is initiated, resulting in attenuation of the activated T effector cell function. Thus, blocking the interaction between PD-1 on a T cell, and PD-L1/2 on another cell (e.g., tumor cell) with a PD-1 antagonist is known as checkpoint inhibition, and releases the T cells from inhibition. In contrast, PD-1 agonist antibodies can bind to PD-1 and send an inhibitory signal and attenuate the function of a T cell. Thus, PD-1 agonist antibodies can be incorporated into various embodiments described herein as an effector molecule binding/modulating moiety, which can accomplish localized tissue-specific immunomodulation when paired with a targeting moiety.

[0109] The effector molecule binding/modulating moiety can provide an immunosuppressive signal or environment in a variety of ways. In some embodiments, the effector binding/modulating moiety comprises an ICIM binding/modulating moiety that directly binds and (under the appropriate conditions as described herein) activates an inhibitory receptor expressed by immune cells responsible for driving disease pathology. In another embodiment, the effector binding/modulating moiety comprises and IIC binding/modulating moiety and binds and accumulates immunosuppressive immune cells. In some embodiments, the accumulated immune suppressive cells promote immune privilege. In another embodiment, the effector binding/modulating moiety comprises an SM binding/modulating moiety which manipulates the surrounding microenvironment to make it less permissible for the function of immune cells, e.g., immune cells driving disease pathology. In some embodiments, the SM binding/modulating moiety depletes an entity that promotes immune attack or activation. In some embodiments, the effector binding/modulating moiety comprises an ICSM binding/modulating moiety that binds a member of a pair of stimulatory molecules, e.g., costimulatory molecules, and inhibits the interaction between the costimulatory molecule and the costimulatory molecule counterstructure, such as, but not limited to, OX40 or CD30 or CD40 and OX40L, or CD30L or CD40L, and inhibits the immune stimulation of a cell, such as, but not limited to, a T cell, B cell, NK cell, or other immune cell comprising a member of the pair.

[0110] The targeting moiety and effector binding/modulating moiety are physically tethered, covalently or non-covalently, directly or through a linker entity, to one another, e.g., as a member of the same protein molecule in a therapeutic protein molecule. In some embodiments, the targeting and effector moieties are provided in a therapeutic protein molecule, e.g., a fusion protein, typically as separate domains. In some embodiments, the targeting moiety, the effector binding/modulating moiety, or both each comprises a single domain antibody molecule, e.g., a camelid antibody VHH molecule or human soluble VH domain. It may also contain a single-chain fragment variable (scFv) or a Fab domain. In some embodiments, the therapeutic protein molecule, or a nucleic acid, e.g., an mRNA or DNA, encoding the therapeutic protein molecule, can be administered to a subject. In some embodiments, the targeting and effector molecule binding/modulating moieties are linked to a third entity, e.g., a carrier, e.g., a polymeric carrier, a dendrimer, or a particle, e.g., a nanoparticle. The therapeutic compounds can be used to down regulate an immune response at or in a tissue at a selected target or site while having no or substantially less immunosuppressive function systemically. The target or site can comprise donor tissue or autologous tissue.

[0111] Provided herein are methods of providing site-specific immune privilege for a transplanted donor tissue, e.g., an allograft tissue, e.g., a tissue described herein, e.g., an allograft liver, an allograft kidney, an allograft heart, an allograft pancreas, an allograft thymus or thymic tissue, an allograft skin, or an allograft lung, with therapeutic compounds disclosed herein. In embodiments the treatment minimizes rejection of, minimizes immune effector cell mediated damage to, prolongs acceptance of, or prolongs the functional life of, donor transplant tissue.

[0112] Also provided herein are methods of inhibiting GVHD by minimizing the ability of donor immune cells, e.g., donor T cells, to mediate immune attack of recipient tissue, with therapeutic compounds disclosed herein.

[0113] Also provided herein are methods of treating, e.g., therapeutically treating or prophylactically treating (or preventing), an autoimmune disorder or response in a subject by administration of a therapeutic compound disclosed herein, e.g., to provide site or tissue specific modulation of the immune system. In some embodiments, the method provides tolerance to, minimization of the rejection of, minimization of immune effector cell mediated damage to, or prolonging a function of, subject tissue. In some embodiments, the therapeutic compound includes a targeting moiety that targets, e.g., specifically targets, the tissue under, or at risk for, autoimmune attack. Non-limiting exemplary tissues include, but are not limited to, the pancreas, myelin, salivary glands, synoviocytes, and myocytes.

[0114] As used herein, the terms “treat,” “treated,” or “treating” in regards to therapeutic treatment wherein the object is to slow down (lessen) an undesired physiological condition, disorder or disease, or obtain beneficial or desired clinical results. For example, beneficial or desired clinical results include, but are not limited to, alleviation of symptoms; diminishment of extent of condition, disorder or disease; stabilized (i.e., not worsening) state of condition, disorder or disease; delay in onset or slowing of condition, disorder or disease progression; amelioration of the condition, disorder or disease state or remission (whether partial or total), whether detectable or undetectable; an amelioration of at least one measurable physical parameter, not necessarily discernible by the patient; or enhancement or improvement of condition, disorder or disease. Treatment includes eliciting a clinically significant response without excessive levels of side effects. Treatment also includes prolonging survival as compared to expected survival if not receiving treatment. Thus, “treatment of an autoimmune disease/disorder” means an activity that alleviates or ameliorates any of the primary phenomena or secondary symptoms associated with the autoimmune disease/disorder or other condition described herein. The various disease or conditions are provided herein. The therapeutic treatment can also be administered prophylactically to preventing or reduce the disease or condition before the onset.

[0115] In some embodiments, administration of the therapeutic compound begins after the disorder is apparent. In some embodiments, administration of the therapeutic compound, begins prior to onset, or full onset, of the disorder. In some embodiments, administration of the therapeutic compound, begins prior to onset, or full onset, of the disorder, e.g., in a subject having the disorder, a high-risk subject, a subject having a biomarker for risk or presence of the disorder, a subject having a family history of the disorder, or other indicator of risk of, or asymptomatic presence of, the disorder. For example, in some embodiments, a subject having islet cell damage but which is not yet diabetic, is treated.

[0116] While not wishing to be bound by theory, it is believed that the targeting moiety functions to bind and accumulate the therapeutic to a target selectively expressed at the anatomical site where immune privilege is desired. In some embodiments, e.g., in the context of donor tissue transplantation, the target moiety binds to a target, e.g., an allelic product, present in the donor tissue but not the recipient. For treatment of autoimmune disorders, the targeting moiety binds a target preferentially expressed at the anatomical site where immune privilege is desired, e.g., in the pancreas. For treatment of GVHD, the targeting moiety targets the host tissue, and protects the host against attack from transplanted immune effector cells derived from transplanted tissue.

[0117] Again, while not wishing to be bound by theory, it is believed that the effector binding/modulating moiety serves to deliver an immunosuppressive signal or otherwise create an immune privileged environment.

[0118] Unless otherwise defined, all technical and scientific terms used herein have the same meaning as commonly understood by one of ordinary skill in the art to which these embodiments belong. Although methods and materials similar or equivalent to those described herein can be used in the practice or testing of the present embodiments, suitable methods and materials are described below. All publications, patent applications, patents, and other references mentioned herein are incorporated by reference in their entirety. In addition, the materials, methods, and examples are illustrative only and not intended to be limiting. Headings, sub-headings or numbered or lettered elements, e.g., (a), (b), (i) etc, are presented merely for ease of reading. The use of headings or numbered or lettered elements in this document does not require the steps or elements be performed in alphabetical order or that the steps or elements are necessarily discrete from one another. Other features, objects, and advantages of the embodiments will be apparent from the description and drawings, and from the claims.

### Additional Definitions

[0119] Unless defined otherwise, all technical and scientific terms used herein have the same meaning as commonly understood by one of ordinary skill in the art to which the embodiments pertains. In describing and claiming the present embodiments, the following terminology and terminology otherwise referenced throughout the present application will be used according to how it is defined, where a definition is provided.

[0120] It is also to be understood that the terminology used herein is for the purpose of describing particular embodiments only, and is not intended to be limiting.

[0121] Antibody molecule, as that term is used herein, refers to a polypeptide, e.g., an immunoglobulin chain or fragment thereof, comprising at least one functional immunoglobulin variable domain sequence. An antibody molecule encompasses antibodies (e.g., full-length antibodies) and antibody fragments. In some embodiments, an antibody molecule comprises an antigen binding or functional fragment of a full-length antibody, or a full-length immunoglobulin chain. For example, a full-length antibody is an immunoglobulin (Ig) molecule (e.g., an IgG antibody) that is naturally occurring or formed by normal immunoglobulin gene fragment recombinatorial processes. In embodiments, an antibody molecule refers to an immunologically active, antigen binding portion of an immunoglobulin molecule, such as an antibody fragment. An antibody fragment, e.g., functional fragment, comprises a portion of an antibody, e.g., Fab, Fab′, F(ab′)2, F(ab)2, variable fragment (Fv), domain antibody (dAb), or single chain variable fragment (scFv). A functional antibody fragment binds to the same antigen as that recognized by the intact (e.g., full-length) antibody. The terms “antibody fragment” or “functional fragment” also include isolated fragments consisting of the variable regions, such as the “Fv” fragments consisting of the variable regions of the heavy and light chains or recombinant single chain polypeptide molecules in which light and heavy variable regions are connected by a peptide linker (“scFv proteins”). In some embodiments, an antibody fragment does not include portions of antibodies without antigen binding activity, such as Fc fragments or single amino acid residues. Exemplary antibody molecules include full-length antibodies and antibody fragments, e.g., dAb (domain antibody), single chain, Fab, Fab′, and F(ab′)2 fragments, and single chain variable fragments (scFvs).

[0122] The term “antibody molecule” also encompasses whole or antigen binding fragments of domain, or single domain, antibodies, which can also be referred to as “sdAb” or “VHH.” Domain antibodies comprise either VH or VL that can act as stand-alone, antibody fragments. Additionally, domain antibodies include heavy-chain-only antibodies (HCAbs). Domain antibodies also include a CH2 domain of an IgG as the base scaffold into which CDR loops are grafted. It can also be generally defined as a polypeptide or protein comprising an amino acid sequence that is comprised of four framework regions interrupted by three complementarity determining regions. This is represented as FR1-CDR1-FR2-CDR2-FR3-CDR3-FR4. sdAbs can be produced in camelids such as llamas, but can also be synthetically generated using techniques that are well known in the art. The numbering of the amino acid residues of a sdAb or polypeptide is according to the general numbering for VH domains given by Kabat et al. (“Sequence of proteins of immunological interest,” US Public Health Services, NIH Bethesda, Md., Publication No. 91, which is hereby incorporated by reference). According to this numbering, FR1 of a sdAb comprises the amino acid residues at positions 1-30, CDR1 of a sdAb comprises the amino acid residues at positions 31-36, FR2 of a sdAb comprises the amino acids at positions 36-49, CDR2 of a sdAb comprises the amino acid residues at positions 50-65, FR3 of a sdAb comprises the amino acid residues at positions 66-94, CDR3 of a sdAb comprises the amino acid residues at positions 95-102, and FR4 of a sdAb comprises the amino acid residues at positions 103-113. Domain antibodies are also described in WO2004041862 and WO2016065323, each of which is hereby incorporated by reference. The domain antibodies can be a targeting moiety as described herein.

[0123] Antibody molecules can be monospecific (e.g., monovalent or bivalent), bispecific (e.g., bivalent, trivalent, tetravalent, pentavalent, or hexavalent), trispecific (e.g., trivalent, tetravalent, pentavalent, or hexavalent), or with higher orders of specificity (e.g, tetraspecific) and/or higher orders of valency beyond hexavalency. An antibody molecule can comprise a functional fragment of a light chain variable region and a functional fragment of a heavy chain variable region, or heavy and light chains may be fused together into a single polypeptide.

[0124] Examples of formats for multispecific therapeutic compounds, e.g., bispecific antibody molecules are shown in the following non-limiting examples. Although illustrated with antibody molecules, they can be used as platforms for therapeutic molecules that include other non-antibody moieties as specific binding or effector moieties. In some embodiments, these non-limiting examples are based upon either a symmetrical or asymmetrical Fc formats.

[0125] For example, the figures illustrate non-limiting and varied symmetric homodimer approach. In some embodiments, the dimerization interface centers around human IgG1 CH2-CH3 domains, which dimerize via a contact interface spanning both CH2/CH2 and CH3/CH3. The resulting bispecific antibodies shown have a total valence comprised of four binding units with two identical binding units at the N-terminus on each side of the dimer and two identical units at the C-terminus on each side of the dimer. In each case the binding units at the N-terminus of the homodimer are different from those at the C-terminus of the homodimer. Using this type of bivalency for both an inhibitory T cell receptor at either terminus of the molecule and bivalency for a tissue tethering antigen can be achieved at either end of the molecule.

[0126] For example, in FIG. 3, a non-limiting embodiment is illustrated. The N-terminus of the homodimer contains two identical Fab domains comprised of two identical light chains, which are separate polypeptides, interfaced with the n-terminal VH-CH1 domains of each heavy chain via the VH/VL interaction and Ckappa or Clambda interaction with CH1. The native disulphide bond between the Ckappa or Clambda with CH1 is present providing a covalent anchor between the light and heavy chains. At the C-terminus of this design are two identical scFv units where by (in this example) the C-terminus of the CH3 domain of the Fc, is followed by a flexible, hydrophilic linker typically comprised of (but not limited to) serine, glycine, alanine, and/or threonine residues, which is followed by the VH domain of each scFv unit, which is followed by a glycine/serine rich linker, followed by a VL domain. These tandem VH and VL domains associate to form a single chain fragment variable (scFv) appended at the C-terminus of the Fc. Two such units exist at the C-terminus of this molecule owing to the homodimeric nature centered at the Fc. The domain order of scFvs may be configured to be from N- to C-terminus either VH-Linker-VL or VL-Linker-VH.

[0127] A non-limiting example of a molecule that has different binding regions on the different ends is where, one end is a PD-1 agonist and the antibody that provides target specificity is an anti-desmoglein 1 antibody, an anti-desmoglein 2 antibody, an anti-desmoglein 3 antibody, or an anti-desmoglein 4 antibody. This can be illustrated as shown, for example, in FIG. 3A, which illustrates the molecules in different orientations. The targeting moeity can also be an anti-MAdCAM antibody.

[0128] In some embodiments, the PD-1 agonist is replaced with an IL-2 mutein, such as, but not limited to, the ones described herein.

[0129] In another example, and as depicted in FIG. 4, the N-terminus of the homodimer contains two identical Fab domains comprised of two identical light chains, which are separate polypeptides, interfaced with the N-terminal VH-CH1 domains of each heavy chain via the VH/VL interaction and Ckappa or Clambda interaction with CH1. The native disulphide bond between the Ckappa or Clambda with CH1 is present providing a covalent anchor between the light and heavy chains. At the C-terminus of this design are two identical VH units (though non-antibody moieties could also be substituted here or at any of the four terminal attachment/fusion points) where by (in this example) the C-terminus of the CH3 domain of the Fc, is followed by a flexible, hydrophilic linker typically comprised of (but not limited to) serine, glycine, alanine, and/or threonine residues, which is followed by a soluble independent VH3 germline family based VH domain. Two such units exist at the C-terminus of this molecule owing to the homodimeric nature centered at the Fc.

[0130] In another non-limiting example, as depicted in FIG. 5, the N-terminus of the homodimer contains two identical Fab domains comprised of two identical light chains, which, unlike FIG. 3 and FIG. 4, are physically conjoined with the heavy chain at the N-terminus via a linker between the C-terminus of Ckappa or Clambda and the N-terminus of the VH. The linker may be 36-80 amino acids in length and comprised of serine, glycine, alanine and threonine residues. The physically conjoined N-terminal light chains interface with the N-terminal VH-CH1 domains of each heavy chain via the VH/VL interaction and Ckappa or Clambda interaction with CH1. The native disulphide bond between the Ckappa or Clambda with CH1 is present providing additional stability between the light and heavy chains. At the C-terminus of this design are two identical Fab units where by (in this example) the C-terminus of the CH3 domain of the Fc, is followed by a flexible, hydrophilic linker typically comprised of (but not limited to) serine, glycine, alanine, and/or threonine residues, which is followed by a CH1 domain, followed by a VH domain at the C-terminus. The light chain that is designed to pair with the C-terminal CH1/VH domains is expressed as a separate polypeptide, unlike the N-terminal light chain which is conjoined to the N-terminal VH/CH1 domains as described. The C-terminal light chains form an interface at between VH/VL and Ckappa or Clambda with CH1. The native disulphide anchors this light chain to the heavy chain. Again, any of the antibody moieties at any of the four attachment/fusion points can be substituted with a non-antibody moiety, e.g., an effector binding/modulating moiety that does not comprise an antibody molecule.

[0131] The bispecific antibodies can also be asymmetric as shown in the following non-limiting examples. Non-limiting example are also depicted in FIG. 6, FIG. 7, and FIG. 8, which illustrate an asymmetric/heterodimer approach. Again, in any of these formats, any of the antibody moieties at any of the four attachment/fusion points can be substituted with a non-antibody moiety, e.g., a effector binding/modulating moiety that does not comprise an antibody molecule. In some embodiments, the dimerization interface centers around the human IgG1 CH2-CH3 domains, which dimerize via a contact interface spanning both CH2/CH2 and CH3/CH3. However, in order to achieve heterodimerization instead of homodimerization of each heavy chain, mutations are introduced in each CH3 domain. The heterodimerizing mutations include T366W mutation (Kabat) in one CH3 domain and T366S, L368A, and Y407V (Kabat) mutations in the other CH3 domain. The heterodimerizing interface may be further stabilized with de novo disulphide bonds via mutation of native residues to cysteine residues such as 5354 and Y349 on opposite sides of the CH3/CH3 interface. The resulting bispecific antibodies shown have a total valence comprised of four binding units. With this approach, the overall molecule can be designed to have bispecificity at just one terminus and monospecificity at the other terminus (trispecificity overall) or bispecificity at either terminus with an overall molecular specificity of 2 or 4. In the illustrative examples below, the C-terminus comprises two identical binding domains which could, for example, provide bivalent monospecificity for a tissue tethering target. At the N-terminus of all three of the illustrative examples, both binding domains comprise different recognition elements/paratopes and which could achieve recognition of two different epitopes on the same effector moiety target, or could recognize for example a T cell inhibitory receptor and CD3. In some embodiments, the N-terminal binding moieties may be interchanged with other single polypeptide formats such as scFv, single chain Fab, tandem scFv, VH or VHH domain antibody configurations for example. Other types of recognition element may be used also, such as linear or cyclic peptides.

[0132] An example of an asymmetric molecule is depicted in FIG. 6. Referring to FIG. 6, the N-terminus of the molecule is comprised of a first light chain paired with a first heavy chain via VH/VL and Ckappa or Clambda/CH1 interactions and a covalent tether comprised of the native heavy/light chain disulphide bond. On the opposite side of this heterodimeric molecule at the N-terminus is a second light chain and a second heavy chain which are physically conjoined via a linker between the C-terminus of Ckappa or Clambda and the N-terminus of the VH. The linker may be 36-80 amino acids in length and comprised of serine, glycine, alanine and threonine residues. The physically conjoined N-terminal light chains interface with the N-terminal VH-CH1 domains of each heavy chain via the VH/VL interaction and Ckappa or Clambda interaction with CH1. The native disulphide bond between the Ckappa or Clambda with CH1 is present providing additional stability between the light and heavy chains. At the C-terminus of the molecule are two identical soluble VH3 germline family VH domains joined via an N-terminal glycine/serine/alanine/threonine based linker to the C-terminus of the CH3 domain of both heavy chain 1 and heavy chain 2.

[0133] In some embodiments, an asymmetric molecule can be as illustrated as depicted in FIG. 7. For example, the N-terminus of the molecule is comprised of two different VH3 germlined based soluble VH domains linked to the human IgG1 hinge region via a glycine/serine/alanine/threonine based linker. The VH domain connected to the first heavy chain is different to the VH domain connected to the second heavy chain. At the C-terminus of each heavy chain is an additional soluble VH3 germline based VH domain, which is identical on each of the two heavy chains. The heavy chain heterodimerizes via the previously described knobs into holes mutations present at the CH3 interface of the Fc module.

[0134] In some embodiments, an asymmetric molecule can be as illustrated in FIG. 8. This example is similar to the molecule shown in FIG. 7, except both N-terminal Fab units are configured in a way that light chain 1 and light chain 2 are physically conjoined with heavy chain 1 and heavy chain 2 via a linker between the C-terminus of Ckappa or Clambda and the N-terminus of each respective VH. The linker in each case may be 36-80 amino acids in length and comprised of serine, glycine, alanine and threonine residues. The physically conjoined N-terminal light chains interface with the N-terminal VH-CH1 domains of each heavy chain via the VH/VL interaction and Ckappa or Clambda interaction with CH1. The native disulphide bond between the Ckappa or Clambda with CH1 is present providing additional stability between the light and heavy chains.

[0135] Bispecific molecules can also have a mixed format. This is illustrated, for example, in FIG. 9, FIG. 10, and FIG. 11.

[0136] For example, as illustrated in FIG. 9, illustrates a homodimer Fc based approach (see FIGS. 3, 4, and 5), combined with the moiety format selection of FIG. 7, whereby the total molecular valency is four, but specificity is restricted to two specificities. The N-terminus is comprised of two identical soluble VH3 germline based VH domains and the C-terminus is comprised of two identical soluble VH3 germlined based VH domains of different specificity to the N-terminal domains. Therefore, each specificity has a valence of two. Again, in this format, any of the antibody moieties at any of the four attachment/fusion points can be substituted with a non-antibody moiety, e.g., an effector binding/modulating moiety that does not comprise an antibody molecule.

[0137] FIG. 10 illustrates another example. In this example, the molecule is comprised of four VH3 germline based soluble VH domains. The first two domains have the same specificity (for example an inhibitory receptor), the 3rd domain from the N-terminus may have specificity for a tissue antigen and the fourth domain from the N-terminus may have specificity for human serum albumin (HSA), thereby granting the molecule extended half-life in the absence of an Ig Fc domain. Three glycine, serine, alanine and/or threonine rich linkers exists between domains 1 and 2, domains 2 and 3, and domains 3 and 4. This format may be configured with up to tetraspecificity, but monovalent in each case, or to have bispecificity with bivalency in each case. The order of domains can be changed. Again, in this format, any of the antibody moieties can be substituted with a non-antibody moiety, e.g., a effector binding/modulating moiety that does not comprise an antibody molecule.

[0138] FIG. 11 illustrates yet another approach. This example is similar to FIGS. 3 and 4, in that it is Fc homodimer based with two identical Fab units (bivalent monospecificity) at the N-terminus of the molecule. This example differs in that the C-terminus of each heavy chain is appended with a tandem-scFv. Thus, in each case the C-terminus of the CH3 domain of the Fc is linked via a glycine/serine/alanine/threonine based linker to the N-terminus of a first VH domain, which is linked via the C-terminus by a 12-15 amino acid glycine/serine rich linker to the N-terminus of a first VL domain, which linked via a 25-35 amino acid glycine/serine/alanine/threonine based linker at the C-terminus to the N-terminus of a second VH domain, which is linked via the C-terminus with a 12-15 amino acid glycine/serine based linker to the N-terminus of a 2nd VL domain. In this Fc homodimer based molecule there are therefore two identical tandem scFvs at the C-terminus of the molecule offering either tetravalency for a single tissue antigen for example or bivalency to two different molecules. This format could also be adapted with a heterodimer Fc core allowing two different tandem-scFvs at the C-terminus of the Fc allowing for monovalent tetraspecificity at the C-terminus while retaining either bivalent monospecificity at the N-terminus or monovalent bispecificity at the N-terminal via usage of single chain Fab configurations as in FIGS. 5, 6, and 7. This molecule can therefore be configured to have 2, 3, 4, 5, or 6 specificities. The domain order of scFvs within the tandem-scFv units may be configured to be from N- to C-terminus either VH-Linker-VL or VL-Linker-VH. Again, in this format, any of the antibody moieties at any of the four attachment/fusion points can be substituted with a non-antibody moiety, e.g., an effector binding/modulating moiety that does not comprise an antibody molecule.

[0139] Bispecific antibodies can also be constructed to have, for example, shorter systemic PK while having increased tissue penetration. These types of antibodies can be based upon, for example, a human VH3 based domain antibody format. These are illustrated, for example, in FIGS. 12, 13, and 14. FIGS. 12, 13, and 14 each comprised a soluble VH3 germline family based VH domain modules. Each domain is approximately 12.5 kDa allowing for a small overall MW, which, without being bound to any particular theory, should be beneficial for enhanced tissue penetration. In these examples, none of the VH domains recognize any half-life extending targets such as FcRn or HSA. As illustrated in FIG. 12, the molecule is comprised of two VH domains joined with a flexible hydrophilic glycine/serine based linker between the C-terminus of the first domain and N-terminus of the second domain. In this example one domain may recognize a T cell costimulatory receptor and the second may recognize a tissue tethering antigen. As illustrated in FIG. 13, the molecule is comprised of three VH domains with N—C-terminal linkages of hydrophilic glycine/serine based linkers. The molecule may be configured to be trispecific but monovalent for each target. It may be bispecific with bivalency for one target and monovalency for another. As illustrated in FIG. 14, the molecule is comprised of four VH domains with N—C-terminal glycine/serine rich linkers between each domain. This molecule may be configured to be tetraspecific, trispecific, or bispecific with varying antigenic valencies in each case. Again, in this format, any of the antibody moieties at can be substituted with a non-antibody moiety, e.g., a effector binding/modulating moiety that does not comprise an antibody molecule.

[0140] Other embodiments of bispecific antibodies are illustrated in FIGS. 15 and 16. FIGS. 15 and 16 are comprised of the naturally heterodimerizing core of the human IgG CH1/Ckappa interface, including the C-terminal heavy/light disulphide bond which covalently anchors the interaction. This format does not contain an Fc or any moieties for half life extension. As illustrated in FIG. 15, the molecule, at the N-terminus of the Ckappa domain is appended with an scFv fragment consisting of an N-terminal VH domain, linked at its C-terminus to the N-terminus of a VL domain via a 12-15 amino acid glycine/serine based linker, which is linked by its C-terminus to the N-terminus of the Ckappa domain via the native VL-Ckappa elbow sequence. The CH1 domain is appended at the N-terminus with an scFv fragment consisting of an N-terminal VL domain linked at its C-terminus via a 12-15 amino acid glycine/serine linker to the N-terminus of a VH domain, which is linked at its C-terminus to the N-terminus of the CH1 domains via the natural VH-CH1 elbow sequence. As illustrated in FIG. 16, the molecule has the same N-terminal configuration to Example 13. However the C-terminus of the Ckappa and CH1 domains are appended with scFv modules which may be in either the VH-VL or VL-VH configuration and may be either specific for the same antigen or specific for two different antigens. The VH/VL inter-domain linkers may be 12-15 amino acids in length and consisting of glycine/serine residues. The scFv binding sub-units may be swapped for soluble VH domains, or peptide recognition elements, or even tandem-scFv elements. This approach can also be configured to use Vlambda and/or Clambda domains. Again, in this format, any of the antibody moieties at any of the attachment/fusion points can be substituted with a non-antibody moiety, e.g., a effector binding/modulating moiety that does not comprise an antibody molecule.

[0141] FIG. 17 illustrates another embodiment. FIG. 17 represents a tandem scFv format consisting of a first N-terminal VL domain linked at its C-terminus to the N-terminus of a first VH domain with a 12-15 amino acid glycine/serine rich linker, followed at the first VH C-terminus by a 25-30 amino acid glycine/serine/alanine/threonine based linker to the N-terminus of a second VL domain. The second VL domain is linked at the C-terminus to the N-terminus of a 2nd VH domain by a 12-15 amino acid glycine/serine linker. Each scFv recognizes a different target antigen such as a costimulatory T cell molecule and a tissue tethering target. Again, in this format, any of the antibody moieties can be substituted with a non-antibody moiety, e.g., a effector binding/modulating moiety that does not comprise an antibody molecule.

[0142] FIG. 18 illustrates another embodiment. FIG. 18 is a F(ab′)2 scFv fusion. This consists of two identical Fab components joined via two disulphide bonds in the native human IgG1 hinge region C-terminal of the human IgG CH1 domain. The human IgG1 CH2 and CH3 domains are absent. At the C-terminus of heavy chains 1 and 2 are two identical scFv fragments linked via a glycine/serine/alanine/threonine rich linker to the C-terminus of the huIgG1 hinge region. In the configuration shown, the VH is N-terminal in each scFv unit and linked via a 12-15 amino acid glycine/serine rich linker to the N-terminus of a VL domain. An alternative configuration would be N-term-VL-Linker-VH-C-term. In this design, the construct is bispecific with bivalency for reach target. Again, in this format, any of the antibody moieties at any of the four attachment/fusion points can be substituted with a non-antibody moiety, e.g., a effector binding/modulating moiety that does not comprise an antibody molecule.

[0143] CD39 molecule, as that term as used herein, refers to a polypeptide having sufficient CD39 sequence that, as part of a therapeutic compound, it phosphohydrolyzes ATP to AMP. In some embodiments, a CD39 molecule phosphohydrolizes ATP to AMP equivalent to, or at least, 10, 20, 30, 40, 50, 60, 70, 80, 90, or 95% of the rate of a naturally occurring CD39, e.g., the CD39 from which the CD39 molecule was derived. In some embodiments, a CD39 molecule has at least 60, 70, 80, 90, 95, 99, or 100% sequence identity, or substantial sequence identity, with a naturally occurring CD39.

[0144] Any functional isoform can be used (with CD39 or other proteins discussed herein). Exemplary CD39 sequence include Genbank accession #NP 001767.3 or a mature form from the following sequence:

(SEQ ID NO: 1)
MEDTKESNVKTFCSKNILAILGFSSIIAVIALLAVGLTQNKALPENVKY
GIVLDAGSSHTSLYIYKWPAEKENDTGVVHQVEECRVKGPGISKFVQKV
NEIGIYLTDCMERAREVIPRSQHQETPVYLGATAGMRLLRMESEELADR
VLDVVERSLSNYPFDFQGARIITGQEEGAYGWITINYLLGKFSQKTRWF
SIVPYETNNQETFGALDLGGASTQVTFVPQNQTIESPDNALQFRLYGKD
YNVYTHSFLCYGKDQALWQKLAKDIQVASNEILRDPCFHPGYKKVVNVS
DLYKTPCTKRFEMTLPFQQFEIQGIGNYQQCHQSILELFNTSYCPYSQC
AFNGIFLPPLQGDFGAFSAFYFVMKFLNLTSEKVSQEKVTEMMKKFCAQ
PWEEIKTSYAGVKEKYLSEYCFSGTYILSLLLQGYHFTADSWEHIHFIG
KIQGSDAGWTLGYMLNLTNMIPAEQPLSTPLSHSTYVFLMVLFSLVLFT
VAIIGLLIFHKPSYFWKDMV.

[0145] In some embodiments, a CD39 molecule comprises a soluble catalytically active form of CD39 found to circulate in human or murine serum, see, e.g., Metabolism of circulating ADP in the bloodstream is mediated via integrated actions of soluble adenylate kinase-1 and NTPDase1/CD39 activities, Yegutkin et al. FASEB J. 2012 September; 26(9):3875-83. A soluble recombinant CD39 fragment is also described in Inhibition of platelet function by recombinant soluble ecto-ADPase/CD39, Gayle, et al., J Clin Invest. 1998 May 1; 101(9): 1851-1859.

[0146] CD73 molecule, as that term as used herein, refers to a polypeptide having sufficient CD73 sequence that, as part of a therapeutic compound, it dephosphorylates extracellular AMP to adenosine. In some embodiments, a CD73 molecule dephosphorylates extracellular AMP to adenosine equivalent to, or at least, 10, 20, 30, 40, 50, 60, 70, 80, 90, or 95% of the rate of a naturally occurring CD73, e.g., the CD73 from which the CD73 molecule was derived. In some embodiments, a CD73 molecule has at least 60, 70, 80, 90, 95, 99, or 100% sequence identity, or substantial sequence identity, with a naturally occurring CD73. Exemplary CD73 sequences include GenBank AAH65937.1 5′-nucleotidase, ecto (CD73) [Homo sapiens] or a mature form from the following sequence,

(SEQ ID NO: 2)
[sequence omitted]

[0147] In some embodiments, a CD73 molecule comprises a soluble form of CD73 which can be shed from the membrane of endothelial cells by proteolytic cleavage or hydrolysis of the GPI anchor by shear stress see, e.g., reference: Yegutkin G, Bodin P, Burnstock G. Effect of shear stress on the release of soluble ecto-enzymes ATPase and 5′-nucleotidase along with endogenous ATP from vascular endothelial cells. Br J Pharmacol 2000; 129: 921-6. For CD73 function see Colgan et al., Physiological roles for ecto-5′-nucleotidase (CD73), Purinergic Signalling, June 2006, 2:351.

[0148] Cell surface molecule binder, as that term is used herein, refers to a molecule, typically a polypeptide, that binds, e.g., specifically, to a cell surface molecule on a cell, e.g., an immunosuppressive immune cell, e.g., a Treg. In some embodiments, the cell surface binder has sufficient sequence from a naturally occurring ligand of the cell surface molecule, that it can specifically bind the cell surface molecule (a cell surface molecule ligand). In some embodiments, the cell surface binding is an antibody molecule that binds, e.g., specifically binds, the cell surface molecule.

[0149] Donor specific targeting moiety, as that term is used herein, refers to a moiety, e.g., an antibody molecule, that as a component of a therapeutic compound, localizes the therapeutic compound preferentially to an implanted donor tissue, as opposed to tissue of a recipient. As a component of a therapeutic compound, the donor specific targeting moiety provides site-specific immune privilege for a transplant tissue, e.g., an organ, from a donor.

[0150] In some embodiments, a donor specific targeting moiety it binds to the product, e.g., a polypeptide product, of an allele present at a locus, which allele is not present at the locus in the (recipient) subject. In some embodiments, a donor specific targeting moiety binds to an epitope on product, which epitope is not present in the (recipient) subject.

[0151] In some embodiments, a donor specific targeting moiety, as a component of a therapeutic compound, preferentially binds to a donor target or antigen, e.g., has a binding affinity for the donor target that is greater for donor antigen or tissue, e.g., at least 2, 4, 5, 10, 50, 100, 500, 1,000, 5,000, or 10,000 fold greater, than its affinity for subject antigen or tissue. In some embodiments, a donor specific targeting moiety, has a binding affinity for a product of an allele of a locus present in donor tissue (but not present in the subject) at least 2, 4, 5, 10, 50, 100, 500, 1,000, 5,000, or 10,000 fold greater, than its affinity for the product of the allele of the locus present in the subject (which allele is not present in donor tissue). Affinity of a therapeutic compound of which the donor specific moiety is a component, can be measured in a cell suspension, e.g., the affinity for suspended cells having the allele is compared with its affinity for suspended cells not having the allele. In some embodiments, the binding affinity for the donor allele cells is below 10 nM. In some embodiments, the binding affinity for the donor allele cells is below 100 pM, 50 pM, or 10 pM.

[0152] In some embodiments, the specificity for a product of a donor allele is sufficient that when the donor specific targeting moiety is coupled to an immune down regulating effector: i) immune attack of the implanted tissue, e.g., as measured by histological inflammatory response, infiltrating T effector cells, or organ function, in the clinical setting—e.g., creatinine for the kidney, is substantially reduced, e.g., as compared to what would be seen in an otherwise similar implant but lacking the donor specific targeting moiety is coupled to an immune down regulating effector; and/or ii) immune function in the recipient, outside or away from the implanted tissue, is substantially maintained. In some embodiments, one or more of the following is seen: at therapeutic levels of therapeutic compound, peripheral blood lymphocyte counts are not substantially impacted, e.g., the level of T cells is within 25, 50, 75, 85, 90, or 95% of normal, the level of B cells is within 25, 50, 75, 85, 90, or 95% of normal, and/or the level of granuloctyes (PMN cells) is within 25, 50, 75, 85, 90, or 95% of normal, or the level of monocytes is within 25, 50, 75, 85, 90, or 95% of normal; at therapeutic levels of therapeutic compound, the ex vivo proliferative function of peripheral blood mononuclear cells (PBMCs) against non-disease relevant antigens is substantially normal or is within 70, 80, or 90% of normal; at therapeutic levels of therapeutic compound, the incidence or risk of opportunistic infections and cancers associated with immunosuppression is not substantially increased over normal; or at therapeutic levels of therapeutic compound, the incidence or risk of opportunistic infections and cancers associated with immunosuppression is substantially less than would be seen with standard of care, or non-targeted, immunosuppression. In some embodiments, the donor specific targeting moiety comprises an antibody molecule, a target specific binding polypeptide, or a target ligand binding molecule.

[0153] Effector, as that term is used herein, refers to an entity, e.g., a cell or molecule, e.g., a soluble or cell surface molecule, which mediates an immune response.

[0154] Effector ligand binding molecule, as used herein, refers to a polypeptide that has sufficient sequence from a naturally occurring counter ligand of an effector, that it can bind the effector with sufficient specificity that it can serve as an effector binding/modulating molecule.

[0155] In some embodiments, it binds to effector with at least 10, 20, 30, 40, 50, 60, 70, 80, 90, or 95% of the affinity of the naturally occurring counter ligand. In some embodiments, it has at least 60, 70, 80, 90, 95, 99, or 100% sequence identity, or substantial sequence identity, with a naturally occurring counter ligand for the effector.

[0156] Effector specific binding polypeptide, as used herein, refers to a polypeptide that can bind with sufficient specificity that it can serve as an effector binding/modulating moiety. In some embodiments, a specific binding polypeptide comprises a effector ligand binding molecule.

[0157] Elevated risk, as used herein, refers to the risk of a disorder in a subject, wherein the subject has one or more of a medical history of the disorder or a symptom of the disorder, a biomarker associated with the disorder or a symptom of the disorder, or a family history of the disorder or a symptom of the disorder.

[0158] Functional antibody molecule to an effector or inhibitory immune checkpoint molecule, as that term is used herein, refers to an antibody molecule that when present as the ICIM binding/modulating moiety of a multimerized therapeutic compound, can bind and agonize the effector or inhibitory immune checkpoint molecule. In some embodiments, the anti-effector or inhibitory immune checkpoint molecule antibody molecule, when binding as a monomer (or binding when the therapeutic compound is not multimerized), to the effector or inhibitory immune checkpoint molecule, does not antagonize, substantially antagonize, prevent binding, or prevent substantial binding, of an endogenous counter ligand of the inhibitory immune checkpoint molecule to inhibitory immune checkpoint molecule. In some embodiments, the anti-effector or inhibitory immune checkpoint molecule antibody molecule when binding as a monomer (or binding when the therapeutic compound is not multimerized), to the inhibitory immune checkpoint molecule, does not agonize or substantially agonize, the effector or inhibitory molecule.

[0159] ICIM binding/modulating moiety, as that term is used herein, refers to an effector binding/modulating moiety that, as part of a therapeutic compound, binds and agonizes a cell surface inhibitory molecule, e.g., an inhibitory immune checkpoint molecule, e.g., PD-1, or binds or modulates cell signaling, e.g., binds a FCRL, e.g., FCRL1-6, or binds and antagonizes a molecule that promotes immune function.

[0160] IIC binding/modulating moiety, as that term is used herein, refers to an effector binding/modulating moiety that, as part of a therapeutic compound, binds an immunosuppressive immune cell. In some embodiments, the IIC binding/modulating moiety increases the number or concentration of an immunosuppressive immune cell at the binding site.

[0161] ICSM binding/modulating moiety, as that term is used herein, refers to an effector binding/modulating moiety that antagonizes an immune stimulatory effect of a stimulatory, e.g., costimulatory, binding pair. A stimulatory or costimulatory binding pair, as that term is used herein, comprises two members, 1) a molecule on the surface of an immune cell; and 2) the binding partner for that cell molecule, which may be an additional immune cell, or a non-immune cell. Ordinarily, upon binding of one member to the other, assuming other requirements are met, the member on the immune cell surfaces stimulates the immune cell, e.g., a costimulatory molecule, and an immune response is promoted. In situations where the costimulatory molecule and the costimulatory molecule counterstructure are both expressed on immune cells, bi-directional activation of both cells may occur. In an embodiment an ICSM binding/modulating moiety binds and antagonizes the immune cell expressed member of a binding pair. For example, it binds and antagonizes OX40. In another embodiment, an ICSM binding/modulating moiety binds and antagonizes the member of the binding pair that itself binds the immune cell expressed member, e.g., it binds and antagonizes OX40L. In either case, inhibition of stimulation or costimulation of an immune cell is achieved. In an embodiment the ICSM binding/modulating moiety decreases the number or the activity of an immunostimulating immune cell at the binding site.

[0162] IL-2 mutein molecule, as that term is used herein, refers to an IL-2 variant that binds with high affinity to the CD25 (IL-2R alpha chain) and with low affinity to the other IL-2R signalling components CD122 (IL-2R beta) and CD132 (IL-2R gamma). Such an IL-2 mutein molecule preferentially activates Treg cells. In embodiments, either alone, or as a component of a therapeutic compound, an IL-2 mutein activates Tregs at least 2, 5, 10, or 100 fold more than cytotoxic or effector T cells. Exemplary IL-2 mutein molecules are described in WO2010085495, WO2016/164937, US2014/0286898A1, WO2014153111A2, WO2010/085495, cytotoxic WO2016014428A2, WO2016025385A1, and US20060269515. Muteins disclosed in these references that include additional domains, e.g., an Fc domain, or other domain for extension of half-life can be used in the therapeutic compounds and methods described herein without such additional domains. In another embodiment an IIC binding/modulating moiety comprises an IL-2 mutein, or active fragment thereof, coupled, e.g., fused, to another polypeptide, e.g., a polypeptide that extends in vivo half-life, e.g., an immunoglobulin constant region, or a multimer or dimer thereof, e.g., AMG 592. In an embodiment the therapeutic compound comprises the IL-2 portion of AMG 592. In an embodiment the therapeutic compound comprises the IL-2 portion but not the immunoglobulin portion of AMG 592. In some embodiments, the mutein does not comprise a Fc region. For some IL-2 muteins, the muteins are engineered to contain a Fc region because such region has been shown to increase the half-life of the mutein. In some embodiments, the extended half-life is not necessary for the methods described and embodied herein. In some embodiments, the Fc region that is fused with the IL-2 mutein comprises a N297 mutations, such as, but not limited to, N297A. In some embodiments, the Fc region that is fused with the IL-2 mutein does not comprise a N297 mutation, such as, but not limited to, N297A.

[0163] An “inhibitory immune checkpoint molecule ligand molecule,” as that term is used herein, refers to a polypeptide having sufficient inhibitory immune checkpoint molecule ligand sequence, e.g., in the case of a PD-L1 molecule, sufficient PD-L1 sequence, that when present as an ICIM binding/modulating moiety of a multimerized therapeutic compound, can bind and agonize its cognate inhibitory immune checkpoint molecule, e.g., again in the case of a PD-L1 molecule, PD-1.

[0164] In some embodiments, the inhibitory immune checkpoint molecule ligand molecule, e.g., a PD-L1 molecule, when binding as a monomer (or binding when the therapeutic compound is not multimerized), to its cognate ligand, e.g., PD-1, does not antagonize or substantially antagonize, or prevent binding, or prevent substantial binding, of an endogenous inhibitory immune checkpoint molecule ligand to the inhibitory immune checkpoint molecule. E.g., in the case of a PD-L1 molecule, the PD-L1 molecule does not antagonize binding of endogenous PD-L1 to PD-1.

[0165] In some embodiments, the inhibitory immune checkpoint molecule ligand when binding as a monomer, to its cognate inhibitory immune checkpoint molecule does not agonize or substantially agonize the inhibitory immune checkpoint molecule. By way of example, e.g., a PD-L1 molecule when binding to PD-1, does not agonize or substantially agonize PD-1.

[0166] In some embodiments, an inhibitory immune checkpoint molecule ligand molecule has at least 60, 70, 80, 90, 95, 99, or 100% sequence identity, or substantial sequence identity, with a naturally occurring inhibitory immune checkpoint molecule ligand.

[0167] Exemplary inhibitory immune checkpoint molecule ligand molecules include: a PD-L1 molecule, which binds to inhibitory immune checkpoint molecule PD-1, and in embodiments has at least 60, 70, 80, 90, 95, 99, or 100% sequence identity, or substantial sequence identity, with a naturally occurring PD-L1, e.g., the PD-L1 molecule comprising the sequence of MRIFAVFIFMTYWHLLNAFTVTVPKDLYVVEYGSNMTIECKFPVEKQLDLAALIVYWE MEDKNIIQFVHGEEDLKVQHSSYRQRARLLKDQLSLGNAALQITDVKLQDAGVYRCMI SYGGADYKRITVKVNAPYNKINQRILVVDPVTSEHELTCQAEGYPKAEVIWTSSDHQVL SGKTTTTNSKREEKLFNVTSTLRINTTTNEIFYCTFRRLDPEENHTAELVIPELPLAHPPNE RTHLVILGAILLCLGVALTFIFRLRKGRMMDVKKCGIQDTNSKKQSDTHLEET (SEQ ID NO: 3), or an active fragment thereof; in some embodiments, the active fragment comprises residues 19 to 290 of the PD-L1 sequence; a HLA-G molecule, which binds to any of inhibitory immune checkpoint molecules KIR2DL4, LILRB1, and LILRB2, and in embodiments has at least 60, 70, 80, 90, 95, 99, or 100% sequence identity, or substantial sequence identity, with a naturally occurring HLA-G. Exemplary HLA-G sequences include, e.g., a mature form found in the sequence at GenBank P17693.1 RecName: Full=HLA class I histocompatibility antigen, alpha chain G; AltName: Full=HLA G antigen; AltName: Full=MHC class I antigen G; Flags: Precursor, or in the sequence

(SEQ ID NO: 4)
MVVMAPRTLFLLLSGALTLTETWAGSHSMRYFSAAVSRPGRGEPRFIAM
GYVDDTQFVRFDSDSACPRMEPRAPWVEQEGPEYWEEETRNTKAHAQTD
RMNLQTLRGYYNQSEASSHTLQWMIGCDLGSDGRLLRGYEQYAYDGKDY
LALNEDLRSWTAADTAAQISKRKCEAANVAEQRRAYLEGTCVEWLHRYL
ENGKEMLQRADPPKTHVTHHPVFDYEATLRCWALGFYPAEIILTWQRDG
EDQTQDVELVETRPAGDGTFQKWAAVVVPSGEEQRYTCHVQHEGLPEPL
MLRWKQSSLPTIPIMGIVA.

[0168] Inhibitory molecule counter ligand molecule, as that term is used herein, refers to a polypeptide having sufficient inhibitory molecule counter ligand sequence such that when present as the ICIM binding/modulating moiety of a multimerized therapeutic compound, can bind and agonize a cognate inhibitory molecule. In some embodiments, the inhibitory molecule counter ligand molecule, when binding as a monomer (or binding when the therapeutic compound is not multimerized), to the inhibitory molecule, does not antagonize, substantially antagonize, prevent binding, or prevent substantial binding, of an endogenous counter ligand of the inhibitory molecule to the inhibitory molecule. In some embodiments, the inhibitory molecule counter ligand molecule when binding as a monomer (or binding when the therapeutic compound is not multimerized), to the inhibitory molecule, does not agonize or substantially agonize, the inhibitory molecule.

[0169] Sequence identity, percentage identity, and related terms, as those terms are used herein, refer to the relatedness of two sequences, e.g., two nucleic acid sequences or two amino acid or polypeptide sequences. In the context of an amino acid sequence, the term “substantially identical” is used herein to refer to a first amino acid that contains a sufficient or minimum number of amino acid residues that are i) identical to, or ii) conservative substitutions of aligned amino acid residues in a second amino acid sequence such that the first and second amino acid sequences can have a common structural domain and/or common functional activity. For example, amino acid sequences that contain a common structural domain having at least about 85%, 90%. 91%, 92%, 93%, 94%, 95%, 96%, 97%, 98% or 99% identity to a reference sequence, e.g., a sequence provided herein.

[0170] In the context of nucleotide sequence, the term “substantially identical” is used herein to refer to a first nucleic acid sequence that contains a sufficient or minimum number of nucleotides that are identical to aligned nucleotides in a second nucleic acid sequence such that the first and second nucleotide sequences encode a polypeptide having common functional activity, or encode a common structural polypeptide domain or a common functional polypeptide activity. For example, nucleotide sequences having at least about 85%, 90%, 91%, 92%, 93%, 94%, 95%, 96%, 97%, 98% or 99% identity to a reference sequence, e.g., a sequence provided herein.

[0171] The term “functional variant” refers to polypeptides that have a substantially identical amino acid sequence to the naturally occurring sequence, or are encoded by a substantially identical nucleotide sequence, and are capable of having one or more activities of the naturally occurring sequence.

[0172] Calculations of homology or sequence identity between sequences (the terms are used interchangeably herein) are performed as follows.

[0173] To determine the percent identity of two amino acid sequences, or of two nucleic acid sequences, the sequences are aligned for optimal comparison purposes (e.g., gaps can be introduced in one or both of a first and a second amino acid or nucleic acid sequence for optimal alignment and non-homologous sequences can be disregarded for comparison purposes). In a preferred embodiment, the length of a reference sequence aligned for comparison purposes is at least 30%, preferably at least 40%, more preferably at least 50%, 60%, and even more preferably at least 70%, 80%, 90%, 100% of the length of the reference sequence. The amino acid residues or nucleotides at corresponding amino acid positions or nucleotide positions are then compared. When a position in the first sequence is occupied by the same amino acid residue or nucleotide as the corresponding position in the second sequence, then the molecules are identical at that position (as used herein amino acid or nucleic acid “identity” is equivalent to amino acid or nucleic acid “homology”).

[0174] The percent identity between the two sequences is a function of the number of identical positions shared by the sequences, taking into account the number of gaps, and the length of each gap, which need to be introduced for optimal alignment of the two sequences.

[0175] The comparison of sequences and determination of percent identity between two sequences can be accomplished using a mathematical algorithm. In a preferred embodiment, the percent identity between two amino acid sequences is determined using the Needleman and Wunsch ((1970) J. Mol. Biol. 48:444-453) algorithm which has been incorporated into the GAP program in the GCG software package (available at http://www.gcg.com), using either a Blossum 62 matrix or a PAM250 matrix, and a gap weight of 16, 14, 12, 10, 8, 6, or 4 and a length weight of 1, 2, 3, 4, 5, or 6. In yet another preferred embodiment, the percent identity between two nucleotide sequences is determined using the GAP program in the GCG software package (available at http://www.gcg.com), using a NWSgapdna.CMP matrix and a gap weight of 40, 50, 60, 70, or 80 and a length weight of 1, 2, 3, 4, 5, or 6. A particularly preferred set of parameters (and the one that should be used unless otherwise specified) are a Blossum 62 scoring matrix with a gap penalty of 12, a gap extend penalty of 4, and a frameshift gap penalty of 5.

[0176] The percent identity between two amino acid or nucleotide sequences can be determined using the algorithm of E. Meyers and W. Miller ((1989) CABIOS, 4:11-17) which has been incorporated into the ALIGN program (version 2.0), using a PAM120 weight residue table, a gap length penalty of 12 and a gap penalty of 4.

[0177] The nucleic acid and protein sequences described herein can be used as a “query sequence” to perform a search against public databases to, for example, identify other family members or related sequences. Such searches can be performed using the NBLAST and) XBLAST programs (version 2.0) of Altschul, et al. (1990) J. Mol. Biol. 215:403-10. BLAST nucleotide searches can be performed with the NBLAST program, score=100, wordlength=12 to obtain nucleotide sequences homologous to for example any a nucleic acid sequence provided herein. BLAST protein searches can be performed with the XBLAST program, score=50, wordlength=3 to obtain amino acid sequences homologous to protein molecules provided herein. To obtain gapped alignments for comparison purposes, Gapped BLAST can be utilized as described in Altschul et al., (1997) Nucleic Acids Res. 25:3389-3402. When utilizing BLAST and Gapped BLAST programs, the default parameters of the respective programs (e.g., XBLAST and NBLAST) can be used. See http://www.ncbi.nlm.nih.gov.

[0178] As used herein, the term “hybridizes under low stringency, medium stringency, high stringency, or very high stringency conditions” describes conditions for hybridization and washing. Guidance for performing hybridization reactions can be found in Current Protocols in Molecular Biology, John Wiley & Sons, N.Y. (1989), 6.3.1-6.3.6, which is incorporated by reference. Aqueous and nonaqueous methods are described in that reference and either can be used. Specific hybridization conditions referred to herein are as follows: 1) low stringency hybridization conditions in 6× sodium chloride/sodium citrate (SSC) at about 45° C., followed by two washes in 0.2×SSC, 0.1% SDS at least at 50° C. (the temperature of the washes can be increased to 55° C. for low stringency conditions); 2) medium stringency hybridization conditions in 6×SSC at about 45° C., followed by one or more washes in 0.2×SSC, 0.1% SDS at 60° C.; 3) high stringency hybridization conditions in 6×SSC at about 45° C., followed by one or more washes in 0.2×SSC, 0.1% SDS at 65° C.; and preferably 4) very high stringency hybridization conditions are 0.5M sodium phosphate, 7% SDS at 65° C., followed by one or more washes at 0.2×SSC, 1% SDS at 65° C. Very high stringency conditions (4) are the preferred conditions and the ones that should be used unless otherwise specified.

[0179] It is understood that the molecules and compounds of the present embodiments may have additional conservative or non-essential amino acid substitutions, which do not have a substantial effect on their functions.

[0180] The term “amino acid” is intended to embrace all molecules, whether natural or synthetic, which include both an amino functionality and an acid functionality and capable of being included in a polymer of naturally occurring amino acids. Exemplary amino acids include naturally occurring amino acids; analogs, derivatives and congeners thereof; amino acid analogs having variant side chains; and all stereoisomers of any of any of the foregoing. As used herein the term “amino acid” includes both the D- or L-optical isomers and peptidomimetics. A “conservative amino acid substitution” is one in which the amino acid residue is replaced with an amino acid residue having a similar side chain. Families of amino acid residues having similar side chains have been defined in the art. These families include amino acids with basic side chains (e.g., lysine, arginine, histidine), acidic side chains (e.g., aspartic acid, glutamic acid), uncharged polar side chains (e.g., glycine, asparagine, glutamine, serine, threonine, tyrosine, cysteine), nonpolar side chains (e.g., alanine, valine, leucine, isoleucine, proline, phenylalanine, methionine, tryptophan), beta-branched side chains (e.g., threonine, valine, isoleucine), and aromatic side chains (e.g., tyrosine, phenylalanine, tryptophan, histidine).

[0181] In some embodiments, the molecule comprises a CD39 molecule, a CD73 molecule, a Cell surface molecule binder, Donor specific targeting moiety Effector ligand binding molecule, ICIM binding/modulating moiety IIC binding/modulating moiety, an inhibitory immune checkpoint molecule ligand molecule, Inhibitory molecule counter ligand molecule, SM binding/modulating moiety, or ICSM binding/modulating moiety.

[0182] SM binding/modulating moiety, as that term is used herein, refers to an effector binding/modulating moiety that, as part of a therapeutic compound, promotes an immunosuppressive local microenvironment, e.g., by providing in the proximity of the target, a substance that inhibits or minimizes attack by the immune system of the target. In some embodiments, the SM binding/modulating moiety comprises, or binds, a molecule that inhibits or minimizes attack by the immune system of the target. In some embodiments, a therapeutic compound comprises an SM binding/modulating moiety that binds and accumulates a soluble substance, e.g., an endogenous or exogenous substance, having immunosuppressive function. In some embodiments, a therapeutic compound comprises an SM binding/modulating moiety that binds and inhibits, sequesters, degrades or otherwise neutralizes a substance, e.g., a soluble substance, typically and endogenous soluble substance, that promotes immune attack. In some embodiments, a therapeutic compound comprises an SM binding/modulating moiety that comprises an immune suppressive substance, e.g. a fragment of protein known to be immunosuppressive. By way of example, an effector molecule binding moiety that binds, or comprises, a substance e.g., a CD39 molecule or a CD73 molecule, that depletes a component, that promotes immune effector cell function, e.g., ATP or AMP.

[0183] Specific targeting moiety, as that term is used herein, refers to donor specific targeting moiety or a tissue specific targeting moiety.

[0184] Subject, as that term is used herein, refers to a mammalian subject, e.g., a human subject. In some embodiments, the subject is a non-human mammal, e.g., a horse, dog, cat, cow, goat, or pig.

[0185] Target ligand binding molecule, as used herein, refers to a polypeptide that has sufficient sequence from a naturally occurring counter ligand of a target ligand that it can bind the target ligand on a target tissue (e.g., donor tissue or subject target tissue) with sufficient specificity that it can serve as a specific targeting moiety. In some embodiments, it binds to target tissue or cells with at least 10, 20, 30, 40, 50, 60, 70, 80, 90, or 95% of the affinity of the naturally occurring counter ligand. In some embodiments, it has at least 60, 70, 80, 90, 95, 99, or 100% sequence identity, or substantial sequence identity, with a naturally occurring counter ligand for the target ligand.

[0186] Target site, as that term is used herein, refers to a site which contains the entity, e.g., epitope, bound by a targeting moiety. In some embodiments, the target site is the site at which immune privilege is established.

[0187] Tissue specific targeting moiety, as that term is used herein, refers to a moiety, e.g., an antibody molecule, that as a component of a therapeutic molecule, localizes the therapeutic molecule preferentially to a target tissue, as opposed to other tissue of a subject. As a component of a therapeutic compound, the tissue specific targeting moiety provides site-specific immune privilege for a target tissue, e.g., an organ or tissue undergoing or at risk for autoimmune attack.

[0188] In some embodiments, a tissue specific targeting moiety binds to a product, e.g., a polypeptide product, which is not present outside the target tissue, or is present at sufficiently low levels that, at therapeutic concentrations of therapeutic molecule, unacceptable levels of immune suppression are absent or substantially absent. In some embodiments, a tissue specific targeting moiety binds to an epitope, which epitope is not present outside, or not substantially present outside, the target site.

[0189] In some embodiments, a tissue specific targeting moiety, as a component of a therapeutic compound, preferentially binds to a target tissue or target tissue antigen, e.g., has a binding affinity for the target tissue or antigen that is greater for target antigen or tissue, e.g., at least 2, 4, 5, 10, 50, 100, 500, 1,000, 5,000, or 10,000 fold greater, than its affinity for non-target tissue or antigen present outside the target tissue. Affinity of a therapeutic compound of which the tissue specific moiety is a component, can be measured in a cell suspension, e.g., the affinity for suspended cells having the target antigen is compared with its affinity for suspended cells not having the target antigen. In some embodiments, the binding affinity for the target antigen bearing cells is below 10 nM.

[0190] In some embodiments, the binding affinity for the target antigen bearing cells is below 100 pM, 50 pM, or 10 pM. In some embodiments, the specificity for a target antigen is sufficient, that when the tissue specific targeting moiety is coupled to an immune down regulating effector: i) immune attack of the target tissue, e.g., as measured by histological inflammatory response, infiltrating T effector cells, or organ function, in the clinical setting, e.g., creatinine for kidney, is substantially reduced, e.g., as compared to what would be seen in an otherwise similar implant but lacking the tissue specific targeting moiety is coupled to an immune down regulating effector; and/or ii) immune function in the recipient, outside or away from the target tissue, is substantially maintained.

[0191] In some embodiments, one or more of the following is seen: at therapeutic levels of therapeutic compound, peripheral blood lymphocyte counts are not substantially impacted, e.g., the level of T cells is within 25, 50, 75, 85, 90, or 95% of normal, the level of B cells is within 25, 50, 75, 85, 90, or 95% of normal, and/or the level of granulocytes (PMN cells) is within 25, 50, 75, 85, 90, or 95% of normal, or the level of monocytes is within 25, 50, 75, 85, 90, or 95% of normal; at therapeutic levels of therapeutic compound, the ex vivo proliferative function of PBMCs against non-disease relevant antigens is substantially normal or is within 70, 80, or 90% of normal; at therapeutic levels of therapeutic compound, the incidence or risk of opportunistic infections and cancers associated with immunosuppression is not substantially increased over normal; or at therapeutic levels of therapeutic compound, the incidence or risk of opportunistic infections and cancers associated with immunosuppression is substantially less than would be seen with standard of care, or non-targeted, immunosuppression. In some embodiments, the tissue specific targeting moiety comprises an antibody molecule. In some embodiments, the donor specific targeting moiety comprises an antibody molecule, a target specific binding polypeptide, or a target ligand binding molecule. In some embodiments, the tissue specific targeting moiety binds a product, or a site on a product, that is present or expressed exclusively, or substantially exclusively, on target tissue.

ICIM Binding/Modulating Moieties: Effector Binding/Modulating Moieties that Bind Inhibitory Receptors

[0192] Methods and compounds described herein provide for a therapeutic compound having an effector binding/modulating moiety comprising an ICIM binding/modulating moiety, that directly binds and activates an inhibitory receptor on the surface of an immune cell, e.g., to reduce or eliminate, or substantially eliminate, the ability of the immune cell to mediate immune attack. Coupling of the ICIM binding/modulating moiety to a targeting entity, promotes site-specific or local down regulation of the immune cell response, e.g., confined substantially to the locations having binding sites for the targeting moiety. Thus, normal systemic immune function is substantially retained. In some embodiments, an ICIM binding/modulating moiety comprises an inhibitory immune checkpoint molecule counter ligand molecule, e.g., a natural ligand, or fragment of a natural ligand (e.g., PD-L1 or HLA-G) of the inhibitory immune checkpoint molecule. In some embodiments, an ICIM binding/modulating moiety comprises a functional antibody molecule, e.g., a functional antibody molecule comprising an scFv binding domain, that engages inhibitory immune checkpoint molecule.

[0193] In some embodiments, the ICIM binding/modulating moiety, comprising, e.g., a functional antibody molecule, or inhibitory immune checkpoint molecule ligand molecule, binds the inhibitory receptor but does not prevent binding of a natural ligand of the inhibitory receptor to the inhibitory receptor. In embodiments a format is used wherein a targeting moiety is coupled, e.g., fused, to an ICIM binding/modulating moiety, comprising, e.g., an scFv domain, and configured so that upon binding of an inhibitory receptor while in solution (e.g., in blood or lymph) (and presumably in a monomeric format), the therapeutic molecule: i) fails to agonize, or fails to substantially agonize (e.g., agonizes at less than 30, 20, 15, 10, or 5% of the level seen with a full agonizing molecule) the inhibitory receptor on the immune cell; and/or ii) fails to antagonize, or fails to substantially antagonize (e.g., antagonizes at less than 30, 20, 15, 10, or 5% of the level seen with a full antagonizing molecule) the inhibitory receptor on the immune cell. A candidate molecule can be evaluated for its ability to agonize or not agonize by its ability to either increase or decrease the immune response in an in vitro cell based assay wherein the target is not expressed, e.g., using an MLR (mixed lymphocyte reaction) based assay.

[0194] In some embodiments, candidate ICIM binding/modulating moieties can reduce, completely or substantially eliminate systemic immunosuppression and systemic immune activation. In some embodiments, the targeting domain of the therapeutic compound, when bound to target, will serve to cluster or multimerize the therapeutic compound on the surface of the tissue desiring immune protection. In some embodiments, the ICIM binding/modulating moiety, e.g., an ICIM binding/modulating moiety comprising a scFv domain, requires a clustered or multimeric state to be able to deliver an agonistic and immunosuppressive signal, or substantial levels of such signal, to local immune cells. This type of therapeutic can, for example, provide to a local immune suppression whilst leaving the systemic immune system unperturbed or substantially unperterbed. That is, the immune suppression is localized to where the suppression is needed as opposed to being systemic and not localized to a particular area or tissue type.

[0195] In some embodiments, upon binding to the target e.g., a target organ, tissue or cell type, the therapeutic compound coats the target, e.g., target organ, tissue or cell type. When circulating lymphocytes attempt to engage and destroy the target, this therapeutic will provide an ‘off’ signal only at, or to a greater extent at, the site of therapeutic compound accumulation.

[0196] A candidate therapeutic compound can be evaluated for the ability to bind, e.g., specifically bind, its target, e.g., by ELISA, a cell based assay, or surface plasmon resonance. This property should generally be maximized, as it mediates the site-specificity and local nature of the immune privilege. A candidate therapeutic compound can be evaluated for the ability to down regulate an immune cell when bound to target, e.g., by a cell based activity assay. This property should generally be maximized, as it mediates the site-specificity and local nature of the immune privilege. The level of down regulation effected by a candidate therapeutic compound in monomeric (or non-bound) form can be evaluated, e.g., by a cell based activity assay. This property should generally be minimized, as could mediate systemic down regulation of the immune system. The level of antagonism of a cell surface inhibitory molecule, e.g., an inhibitory immune checkpoint molecule, effected by a candidate therapeutic compound in monomeric (or non-bound) form can be evaluated, e.g., by a cell based activity assay. This property should generally be minimized, as could mediate systemic unwanted activation of the immune system. Generally, the properties should be selected and balanced to produce a sufficiently robust site specific immune privilege without unacceptable levels of non-site specific agonism or antagonism of the inhibitory immune checkpoint molecule.

[0197] Exemplary Inhibitory Immune Checkpoint Molecules

[0198] Exemplary inhibitory molecules (e.g., an inhibitory immune checkpoint molecule) (together with their counter ligands) can be found in Table 1. This table lists molecules to which exemplary ICIM binding moieties can bind.

TABLE 1
Cell surface inhibitory molecules, e.g., inhibitory
immune checkpoint molecules (column A), counter ligands
(column B) and cell types affected (column C).

| A | B | C |
|---|---|---|
| PD-1 | PD-L1, PD-L2 | T cells, B cells |
| Alkaline phosphatase | | |
| B7-H3 | Unknown | T cells |
| B7-H4 | Neuropilin 1, | T cells |
| | Neuropilin 2, | |
| | Plexin4A | |
| BTLA | HVEM | T cells, B cells |
| CTLA-4 | CD80, CD86 | T cells |
| IDO1 | Tryptophan | Lymphocytes |
| IDO2 | Tryptophan | Lymphocytes |
| KIR2DL1, | HLA MHC class I | NK cells |
| KIR2DL2/3, | | |
| KIR3DL1, KIR3DL2 | | |
| LAG3 | HLA MHC class II | T cells |
| TIM-3 | Galectin-9 | T cells |
| VISTA | Unknown | T cells, myeloid |
| | | cells |
| TIGIT | CD155 | T cells |
| KIR2DL4 | HLA-G | NK cells |
| LILRB1 | HLA-G | T cells, NK cells, |
| | | B cells, monocytes, |
| | | dendritic cells |
| LILRB2 | HLA-G | Monocytes, dendritic |
| | | cells, neutrophils, |
| | | some tumor cells |
| NKG2A | Nonclassical MHC | T cells, NK cells |
| | Glycoproteins class I | |
| FCRL1-6 | FCRL1 - 2 not known | B cells |
| | FCRL4 = IgA | |
| | FCRL5 = IgG | |
| | FCRL6 = MHC | |
| | Class II | |
| | BUTYROPHILINS, | Modulation of immune |
| | for example | cells |
| | BTN1A1, BTN2A2, | |
| | BTNL2, BTNL1, | |
| | BTNL8 | |

[0199] The PD-L1/PD-1 Pathway

[0200] Programmed cell death protein 1, (often referred to as PD-1) is a cell surface receptor that belongs to the immunoglobulin superfamily. PD-1 is expressed on T cells and other cell types including, but not limited to, B cells, myeloid cells, dendritic cells, monocytes, T regulatory cells, iNK T cells. PD-1 binds two ligands, PD-L1 and PD-L2, and is an inhibitory immune checkpoint molecule. Engagement with a cognate ligand, PD-L1 or PD-L2, in the context of engagement of antigen loaded MHC with the T cell receptor on a T cell minimizes or prevents the activation and function of T cells. The inhibitory effect of PD-1 can include both promoting apoptosis (programmed cell death) in antigen specific T cells in lymph nodes and reducing apoptosis in regulatory T cells (suppressor T cells).

[0201] In some embodiments, a therapeutic compound comprises an ICIM binding/modulating moiety which agonizes PD-1 inhibition. An ICIM binding/modulating moiety can include an inhibitory molecule counter ligand molecule, e.g., comprising a fragment of a ligand of PD-1 (e.g., a fragment of PD-L1 or PD-L2) or another moiety, e.g., a functional antibody molecule, comprising, e.g., an scFv domain that binds PD-1.

[0202] In some embodiments, a therapeutic compound comprises a targeting moiety that is preferentially binds a donor antigen not present in, or present in substantially lower levels in the subject, e.g., a donor antigen from Table 2, and is localized to donor graft tissue in a subject. In some embodiments, it does not bind, or does not substantially bind, other tissues. In some embodiments, a therapeutic compound can include a targeting moiety that is specific for HLA-A2 and specifically binds donor allograft tissue but does not bind, or does not substantially bind, host tissues. In some embodiments, the therapeutic compound comprises an ICIM binding/modulating moiety, e.g., an inhibitory molecule counter ligand molecule, e.g., comprising a fragment of a ligand of PD-1 (e.g., a fragment of PD-L1 or PD-L2) or another moiety, e.g., a functional antibody molecule, comprising, e.g., an scFv domain that binds PD-1, such that the therapeutic compound, e.g., when bound to target, activates PD-1. The therapeutic compound targets an allograft and provides local immune privilege to the allograft.

[0203] In some embodiments, a therapeutic compound comprises a targeting moiety that is preferentially binds to an antigen of Table 3, and is localized to the target in a subject, e.g., a subject having an autoimmune disorder, e.g., an autoimmune disorder of Table 3. In some embodiments, it does not bind, or does not substantially bind, other tissues. In some embodiments, the therapeutic compound comprises an ICIM binding/modulating moiety, e.g., an inhibitory molecule counter ligand molecule, e.g., comprising a fragment of a ligand of PD-1 (e.g., a fragment of PD-L1 or PD-L2) or another moiety, e.g., a functional antibody molecule, comprising, e.g., an scFv domain that binds PD-1, such that the therapeutic compound, e.g., when bound to target, activates PD-1. The therapeutic compound targets a tissue subject to autoimmune attack and provides local immune privilege to the tissue.

[0204] PD-L1 and PDL2, or polypeptides derived therefrom, can provide candidate ICIM binding moieties. However, in monomer form, e.g., when the therapeutic compound is circulating in blood or lymph, this molecule could have an undesired effect of antagonizing the PD-L1/PD-1 pathway, and may only agonize the PD-1 pathway when clustered or multimerized on the surface of a target, e.g., a target organ. In some embodiments, a therapeutic compound comprises an ICIM binding/modulating moiety comprising a functional antibody molecule, e.g., a scFv domain, that is inert, or substantially inert, to the PD-1 pathway in a soluble form but which agonizes and drives an inhibitory signal when multimerized (by the targeting moiety) on the surface of a tissue.

[0205] The HLA-G: KIR2DL4/LILRB1/LILRB2 Pathway

[0206] KIR2DL4, LILRB1, and LILRB2 are inhibitory molecules found on T cells, NK cells, and myeloid cells. HLA-G is a counter ligand for each.

[0207] KIR2DL4 is also known as CD158D, G9P, KIR-103AS, KIR103, KIR103AS, KIR, KIR-2DL4, killer cell immunoglobulin like receptor, and two Ig domains and long cytoplasmic tail 4. LILRB1 is also known as LILRB1, CD85J, ILT-2, ILT2, LIR-1, LIR1, MIR-7, MIR7, PIR-B, PIRB, leukocyte immunoglobulin like receptor B1. LILRB2 is also known as CD85D, ILT-4, LIR-2, LIR2, MIR-10, MIR10, and ILT4.

[0208] A therapeutic compound comprising an HLA-G molecule can be used to provide inhibitory signals to an immune cell comprising any of KIR2DL4, LILRB1, and LILRB2, e.g., with multimerized therapeutic compound molecules comprising an HLA-G molecule and thus provide site-specific immune privilege.

[0209] A therapeutic compound comprising an agonistic anti-KIR2DL4, anti-LILRB1, or anti-LILRB2 antibody molecule can be used to provide inhibitory signals to an immune cell comprising any of KIR2DL4, LILRB1, and LILRB2.

[0210] HLA-G only delivers an inhibitory signal when multimerized, for example, when expressed on the surface of a cell or when conjugated to the surface of a bead. In embodiments, a therapeutic compound comprising an HLA-G molecule which therapeutic compound does not multimerize in solution (or does not multimerize sufficiently to result in significant levels of inhibitory molecule agonization), is provided. The use of HLA-G molecules that minimize mulitmerization in solution will minimize systemic agonization of immune cells and unwanted immune suppression.

[0211] While not wishing to be bound by theory, it is believed that HLA-G is not effective in down regulation unless multimerized, that binding of the therapeutic compound to target, through the targeting moiety, multimerizes the ICIM binding entity, and that the multimerized ICIM binding entity, binds and clusters inhibitory molecules on the surface of an immune cell, thus mediating a negative signal that down regulates the immune cell. Thus, infiltrating immune cells attempting to damage the target tissue, including antigen presenting cells and other myeloid cells, NK cells and T cells, are down regulated.

[0212] While HLA-G molecules minimize antagonism when in monomeric form are desirable, the redundancy of LILRB1 and LILRB2 will minimize the impact on a systemic effect even with some monomeric antagonism.

[0213] In some embodiments, the therapeutic compound comprises an ICIM binding/modulating moiety that comprises a HLA-G molecule, e.g., an B2M-free isoform (e.g., HLA-G5), see Carosella et al., Advances in Immunology, 2015, 127:33. In a B2M-free format, HLA-G preferentially binds LILRB2.

[0214] Suitable sequences for the construction of HLA-G molecules include GenBank P17693.1 RecName: Full=HLA class I histocompatibility antigen, alpha chain G; AltName: Full=HLA G antigen; AltName: Full=MHC class I antigen G; Flags: Precursor, or MVVMAPRTLFLLLSGALTLTETWAGSHSMRYFSAAVSRPGRGEPRFIAMGYVDDTQFV RFDSDSACPRMEPRAPWVEQEGPEYWEEETRNTKAHAQTDRMNLQTLRGYYNQSEAS SHTLQWMIGCDLGSDGRLLRGYEQYAYDGKDYLALNEDLRSWTAADTAAQISKRKCE AANVAEQRRAYLEGTCVEWLHRYLENGKEMLQRADPPKTHVTHHPVFDYEATLRCW ALGFYPAEIILTWQRDGEDQTQDVELVETRPAGDGTFQKWAAVVVPSGEEQRYTCHVQ HEGLPEPLMLRWKQSSLPTIPIMGIVAGLVVLAAVVTGAAVAAVLWRKKSSD (SEQ ID NO: 5). A candidate HLA-G molecule can be tested for suitability for use in methods and compounds, e.g., by methods analogous to those described in “Synthetic HLA-G proteins for therapeutic use in transplantation,” LeMaoult et al., 2013 The FASEB Journal 27:3643.

[0215] In some embodiments, a therapeutic compound comprises a targeting moiety that is preferentially binds a donor antigen not present in, or present in substantially lower levels in the subject, e.g., a donor antigen from Table 2, and is localized to donor graft tissue in a subject. In some embodiments, it does not bind, or does not substantially bind, other tissues. In some embodiments, a therapeutic compound can include a targeting moiety that is specific for HLA-A2 and specifically binds a donor allograft but does not bind host tissues and is combined with an ICIM binding/modulating moiety that comprises a HLA-G molecule that binds KIR2DL4, LILRB1, or LILRB2, such that the therapeutic compound, e.g., when bound to target, activates KIR2DL4, LILRB1, or LILRB2. The therapeutic compound targets an allograft and provides local immune privilege to the allograft.

[0216] In some embodiments, a therapeutic compound comprises a targeting moiety that is preferentially binds a tissue specific antigen, e.g., an antigen from Table 3, and is localized to the target site in a subject, e.g., a subject having an autoimmune disorder, e.g., an autoimmune disorder from Table 3. In some embodiments, it does not bind, or does not substantially bind, other tissues. In embodiments the therapeutic compound comprises an ICIM binding/modulating moiety that comprises a HLA-G molecule binds KIR2DL4, LILRB1, or LILRB2, such that the therapeutic compound, e.g., when bound to target, activates KIR2DL4, LILRB1, or LILRB2. The therapeutic compound targets an tissue subject to autoimmune attack and provides local immune privilege to the tissue.

[0217] It is likely possible to engineer a stable and soluble HLA-G-B2M fusion protein that can also bind LILRB1. For example, the crystal structure of HLA-G was determined using HLA-G/B2M monomers (Clements et al. 2005 PNAS 102:3360)

[0218] FCRL Family

[0219] FCRL1-6 generally inhibit B cell activation or function. These type 1 transmembrane glycoproteins are composed of different combinations of 5 types of immunoglobulin-like domains, with each protein consisting of 3 to 9 domains, and no individual domain type conserved throughout all of the FCRL proteins. In general, FCRL expression is restricted to lymphocytes, with the primary expression in B lymphocytes. Generally, FCRLs function to repress B cell activation.

[0220] In some embodiments, an ICIM binding/modulating moiety can comprise an agonistic anti-FCRL antibody molecule. In some embodiments, the therapeuticcompound comprises an anti-FCRL antibody molecule and an anti-B cell receptor (BCR) antibody molecule. While not wishing to be bound be theory, it is believed that a therapeutic compound comprising antibody molecules of both specificities will bring the FCRL into close proximity with the BCR and inhibit BCR signaling.

[0221] Butyrophilins and Butyrophilin-Like Molecules

[0222] Effector binding/modulating moiety can comprise an agonist or antagonist of a butyrophilin. In some embodiments, an effector binding/modulating moiety an agonistic or functional BTN1A1 molecule, BTN2A2 molecule, BTNL2 molecule, or BTNL1 molecule.

[0223] A functional BTNXi molecule (where Xi=1A1, 2A2, L2, or L1), as that term as used herein, refers to a polypeptide having sufficient BTNXi sequence that, as part of a therapeutic compound, it inhibits T cells. In some embodiments, a BTNXi molecule has at least 60, 70, 80, 90, 95, 99, or 100% sequence identity, or substantial sequence identity, with a naturally occurring butyrophilin or butyrophilin-like molecule.

[0224] In some embodiments, an effector binding/modulating moiety an antagonistic BTNL8 molecule.

[0225] An antagonistic BTNL8 molecule, as that term as used herein, refers to a polypeptide having sufficient BTNL8 sequence that, as part of a therapeutic compound, it inhibits the activation, proliferation, or secretion of cytokine by a resting T cell. In some embodiments, a BTNL8 molecule has at least 60, 70, 80, 90, 95, 99, or 100% sequence identity, or substantial sequence identity, with a naturally occurring butyrophilin.

IIC Binding/Modulating Moieties: Effector Binding/Modulating Moieties that Recruit Immunosuppressive T Cells

[0226] In some embodiments, a therapeutic compound comprises an effector binding/modulating moiety, e.g., an IIC binding/modulating moiety, that binds, activates, or retains immunosuppressive cells, e.g., immunosuppressive T cells, at the site mediated by the targeting moiety, providing site-specific immune privilege. The IIC binding/modulating moiety, e.g., an IIC binding/modulating moiety comprising an antibody molecule, comprising, e.g., an scFv binding domain, binds immunosuppressive cell types, e.g., Tregs, e.g., Foxp3+CD25+ Tregs. Organ, tissue or specific cell type tolerance is associated with an overwhelming increase of Tregs proximal and infiltrating the target organ; in embodiments, the methods and compounds described herein synthetically re-create and mimic this physiological state. Upon accumulation of Tregs, an immunosuppressive microenvironment is created that serves to protect the organ of interest from the immune system.

[0227] GARP-Binders as a Treg and TGFB Targeting Molecule

[0228] GARP is a membrane protein receptor for latent TGF-beta expressed on the surface of activated Tregs (Tran et al. 2009 PNAS 106:13445 and Wang et al. 2009 PNAS 106:13439). In some embodiments, a therapeutic compound comprises an IIC binding entity that binds one or both of soluble GARP and GARP-expressing cells, such as activated human Tregs, and a targeting moiety that targets the therapeutic compound to the target tissue of interest. IIC binding/modulating moieties that comprises a GARP binder include, e.g., an IIC binding/modulating moiety that comprises an anti-GARP antibody molecule, e.g., an anti-GARP scFv domain. While not wishing to be bound by theory, it is believed that the therapeutic compound that comprises a GARP binder effects accumulation of GARP-expressing Tregs at the site targeted by the targeting moiety of the therapeutic compound, e.g., a transplant or site of organ injury. Again, while not wishing to be bound by theory, it is believed that a therapeutic compound that comprises a GARP binder can also effect accumulation of soluble GARP at site of organ injury, which will serve to bind and activate TGFB1, an immunosuppressive cytokine, in a local manner (Fridrich et al 2016 PLoS One 11:e0153290; doi: 10.1371/journal.pone.0153290, and Hahn et a 2013 Blood 15:1182). Thus, an effector binding/modulating moiety that comprises a GARP binder can act as either a IIC binding/modulating moiety or an SM binding/modulating moiety.

[0229] CTLA-4 as a Treg Targeting and T Effector Cell Silencing Molecule

[0230] In some embodiments, an effector binding/modulating moiety, e.g., comprises an antibody molecule, e.g., an scFv domain, that binds CTLA-4 expressed on the surface of Tregs. The therapeutic molecule accumulates or retains CTLA-4+ Tregs at the target site, with local immunosuppression the consequence.

[0231] Though expressed more highly on Tregs, CTLA-4 is also expressed on activated T cells. A therapeutic compound comprising an effector binding/modulating moiety, e.g., an anti-CTLA-4 antibody, or a functional anti-CTLA-4 antibody, can down regulate the CTLA-4 expressing T cell. Thus, in a therapeutic compound comprising an effector binding/modulating moiety that binds CTLA-4, the effector moiety can also act as an ICIM binding/modulating moiety.

[0232] In some embodiments, the anti-CTLA-4 binder is neither antagonizing, or agonizing when in monomeric format, and is only agonizing when clustered or multimerized upon binding to the target.

[0233] While not wishing to be bound by theory, it is believed that the binding of the therapeutic compound, via the targeting moiety, to the target, effects multimerization of therapeutic compound. In the case of memory and activated T cells, CTLA-4 bound by the effector binding/modulating moiety of the therapeutic compound, is clustered, and an inhibitory signal by engagement of CTLA-4 expressed by memory and activated T cells.

[0234] In some embodiments, the anti-CTLA-4 binder is neither antagonizing, or agonizing when in monomeric format, and is only agonizing when clustered or multimerized upon binding to the target.

[0235] IL-2 Mutein Molecules: IL-2 Receptor Binders that Activate Tregs

[0236] IL-2 mutein molecules that preferentially expand or stimulate Treg cells (over cytotoxic T cells) can be used as an IIC binding/modulating moiety.

[0237] In some embodiments, IIC binding/modulating moiety comprises a IL-2 mutein molecule. As used herein, the term “IL-2 mutein molecule” or “IL-2 mutein” refers to an IL-2 variant that preferentially activates Treg cells. In some embodiments, either alone, or as a component of a therapeutic compound, an IL-2 mutein molecule activates Tregs at least 2, 5, 10, or 100 fold more than cytotoxic T cells. A suitable assay for evaluating preferential activation of Treg cells can be found in U.S. Pat. No. 9,580,486 at, for example, Examples 2 and 3, or in WO2016014428 at, for example, Examples 3, 4, and 5, each of which is incorporated by reference in its entirety. The sequence of mature IL-2 is

(SEQ ID NO: 6)
APTSSSTKKTQLQLEHLLLDLQMILNGINNYKNPKLTRMLT
FKFYMPKKATELKHLQCLEEELKPLEEVLNLAQSKNFHLRP
RDLISNINVIVLELKGSETTFMCEYADETATIVEFLNRWITFC
QSIISTLT (mature IL-2 sequence)

[0238] The immature sequence of IL-2 can be represented by

(SEQ ID NO: 15)
MYRMQLLSCIALSLALVTNSAPTSSSTKKTQLQLEHLLLDL
QMILNGINNYKNPKLTRMLTFKFYMPKKATELKHLQCLEE
ELKPLEEVLNLAQSKNFHLRPRDLISNINVIVLELKGSETTF
[sequence omitted]

[0239] In some embodiments, an IIC binding/modulating moiety comprises an IL-2 mutein, or active fragment thereof, coupled, e.g., fused, to another polypeptide, e.g., a polypeptide that extends in vivo half-life, e.g., an immunoglobulin constant region, or a multimer or dimer thereof.

[0240] An IL-2 mutein molecule can be prepared by mutating one or more of the residues of IL-2. Non-limiting examples of IL-2-muteins can be found in WO2016/164937, U.S. Pat. Nos. 9,580,486, 7,105,653, 9,616,105, 9,428,567, US2017/0051029, US2014/0286898A1, WO2014153111A2, WO2010/085495, WO2016014428A2, WO2016025385A1, and US20060269515, each of which are incorporated by reference in its entirety.

[0241] In some embodiments, the alanine at position 1 of the sequence above is deleted. In some embodiments, the IL-2 mutein molecule comprises a serine substituted for cysteine at position 125 of the mature IL-2 sequence. Other combinations of mutations and substitutions that are IL-2 mutein molecules are described in US20060269515, which is incorporated by reference in its entirety. In some embodiments, the cysteine at position 125 is also substituted with a valine or alanine. In some embodiments, the IL-2 mutein molecule comprises a V91K substitution. In some embodiments, the IL-2 mutein molecule comprises a N88D substitution. In some embodiments, the IL-2 mutein molecule comprises a N88R substitution. In some embodiments, the IL-2 mutein molecule comprises a substitution of H16E, D84K, V91N, N88D, V91K, or V91R, any combinations thereof. In some embodiments, these IL-2 mutein molecules also comprise a substitution at position 125 as described herein. In some embodiments, the IL-2 mutein molecule comprises one or more substitutions selected from the group consisting of: T3N, T3A, L12G, L12K, L12Q, L125, Q13G, E15A, E15G, E155, H16A, H16D, H16G, H16K, H16M, H16N, H16R, H16S, H16T, H16V, H16Y, L19A, L19D, L19E, L19G, L19N, L19R, L195, L19T, L19V, D20A, D20E, D20H, D20I, D20Y, D20F, D20G, D20T, D20W, M23R, R81A, R81G, R81S, R81T, D84A, D84E, D84G, D84I, D84M, D84Q D84R, D84S, D84T, S87R, N88A, N88D, N88E, N88I, N88F, N88G, N88M, N88R, N88S, N88V, N88W, V91D, V91E, V91G, V91S, I92K, I92R, E95G, and Q126. In some embodiments, the amino acid sequence of the IL-2 mutein molecule differs from the amino acid sequence set forth in mature IL-2 sequence with a C125A or C125S substitution and with one substitution selected from T3N, T3A, L12G, L12K, L12Q L12S, Q13G, E15A, E15G, E155, H16A, H16D, H16G, H16K, H16M, H16N, H16R, H16S, H16T, H16V, H16Y, L19A, L19D, L19E, L19G, L19N, L19R, L195, L19T, L19V, D20A, D20E, D20F, D20G, D20T, D20W, M23R, R81A, R81G, R81S, R81T, D84A, D84E, D84G, D84I, D84M, D84Q, D84R, D84S, D84T, S87R, N88A, N88D, N88E, N88F, N88I, N88G, N88M, N88R, N88S, N88V, N88W, V91D, V91E, V91G, V91S, I92K, I92R, E95G, Q126I, Q126L, and Q126F. In some embodiments, the IL-2 mutein molecule differs from the amino acid sequence set forth in mature IL-2 sequence with a C125A or C125S substitution and with one substitution selected from D20H, D20I, D20Y, D20E, D20G, D20W, D84A, D84S, H16D, H16G, H16K, H16R, H16T, H16V, I92K, I92R, L12K, L19D, L19N, L19T, N88D, N88R, N88S, V91D, V91G, V91K, and V91S. In some embodiments, the IL-2 mutein comprises N88R and/or D20H mutations.

[0242] In some embodiments, the IL-2 mutein molecule comprises a mutation in the polypeptide sequence at a position selected from the group consisting of amino acid 30, amino acid 31, amino acid 35, amino acid 69, and amino acid 74. In some embodiments, the mutation at position 30 is N30S. In some embodiments, the mutation at position 31 is Y31H. In some embodiments, the mutation at position 35 is K35R. In some embodiments, the mutation at position 69 is V69A. In some embodiments, the mutation at position 74 is Q74P. In some embodiments, the mutein comprises a V69A mutation, a Q74P mutation, a N88D or N88R mutation, and one or more of L53I, L56I, L80I, or L118I mutations. In some embodiments, the mutein comprises a V69A mutation, a Q74P mutation, a N88D or N88R mutation, and a L to I mutation selected from the group consisting of: L53I, L56I, L80I, and L118I mutation. In some embodiments, the IL-2 mutein comprises a V69A, a Q74P, a N88D or N88R mutation, and a L53I mutation. In some embodiments, the IL-2 mutein comprises a V69A, a Q74P, a N88D or N88R mutation, and a L56I mutation. In some embodiments, the IL-2 mutein comprises a V69A, a Q74P, a N88D or N88R mutation, and a L80I mutation. In some embodiments, the IL-2 mutein comprises a V69A, a Q74P, a N88D or N88R mutation, and a L118I mutation. As provided for herein, the muteins can also comprise a C125A or C125S mutation.

[0243] In some embodiments, the IL-2 mutein molecule comprises a substitution selected from the group consisting of: N88R, N88I, N88G, D20H, D109C, Q126L, Q126F, D84G, or D84I relative to mature human IL-2 sequence provided above. In some embodiments, the IL-2 mutein molecule comprises a substitution of D109C and one or both of a N88R substitution and a C125S substitution. In some embodiments, the cysteine that is in the IL-2 mutein molecule at position 109 is linked to a polyethylene glycol moiety, wherein the polyethylene glycol moiety has a molecular weight of between 5 and 40 kDa.

[0244] In some embodiments, any of the substitutions described herein are combined with a substitution at position 125. The substitution can be a C125S, C125A, or C125V substitution.

[0245] In addition to the substitutions or mutations described herein, in some embodiments, the IL-2 mutein has a substitution/mutation at one or more of positions 73, 76, 100, or 138 that correspond to SEQ ID NO: 15 or positions at one or more of positions 53, 56, 80, or 118 that correspond to SEQ ID NO: 6. In some embodiments, the IL-2 mutein comprises a mutation at positions 73 and 76; 73 and 100; 73 and 138; 76 and 100; 76 and 138; 100 and 138; 73, 76, and 100; 73, 76, and 138; 73, 100, and 138; 76, 100 and 138; or at each of 73, 76, 100, and 138 that correspond to SEQ ID NO: 15. In some embodiments, the IL-2 mutein comprises a mutation at positions 53 and 56; 53 and 80; 53 and 118; 56 and 80; 56 and 118; 80 and 118; 53, 56, and 80; 53, 56, and 118; 53, 80, and 118; 56, 80 and 118; or at each of 53, 56, 80, and 118 that correspond to SEQ ID NO: 6. As the IL-2 can be fused or tethered to other proteins, as used herein, the term corresponds to as reference to a SEQ ID NOs: 6 or 15 refer to how the sequences would align with default settings for alignment software, such as can be used with the NCBI website. In some embodiments, the mutation is leucine to isoleucine. Thus, the IL-2 mutein can comprise one more isoleucines at positions 73, 76, 100, or 138 that correspond to SEQ ID NO: 15 or positions at one or more of positions 53, 56, 80, or 118 that correspond to SEQ ID NO: 6. In some embodiments, the mutein comprises a mutation at L53 that correspond to SEQ ID NO: 6. In some embodiments, the mutein comprises a mutation at L56 that correspond to SEQ ID NO: 6. In some embodiments, the mutein comprises a mutation at L80 that correspond to SEQ ID NO: 6. In some embodiments, the mutein comprises a mutation at L118 that correspond to SEQ ID NO: 6. In some embodiments, the mutation is leucine to isoleucine. In some embodiments, the mutein also comprises a mutation as position 69, 74, 88, 125, or any combination thereof in these muteins that correspond to SEQ ID NO: 6. In some embodiments, the mutation is a V69A mutation. In some embodiments, the mutation is a Q74P mutation. In some embodiments, the mutation is a N88D or N88R mutation. In some embodiments, the mutation is a C125A or C125S mutation.

[0246] In some embodiments, the IL-2 mutein comprises a mutation at one or more of positions 49, 51, 55, 57, 68, 89, 91, 94, 108, and 145 that correspond to SEQ ID NO: 15 or one or more positions 29, 31, 35, 37, 48, 69, 71, 74, 88, and 125 that correspond to SEQ ID NO: 6. The substitutions can be used alone or in combination with one another. In some embodiments, the IL-2 mutein comprises substitutions at 2, 3, 4, 5, 6, 7, 8, 9, or each of positions 49, 51, 55, 57, 68, 89, 91, 94, 108, and 145. Non-limiting examples such combinations include, but are not limited to, a mutation at positions 49, 51, 55, 57, 68, 89, 91, 94, 108, and 145; 49, 51, 55, 57, 68, 89, 91, 94, and 108; 49, 51, 55, 57, 68, 89, 91, and 94; 49, 51, 55, 57, 68, 89, and 91; 49, 51, 55, 57, 68, and 89; 49, 51, 55, 57, and 68; 49, 51, 55, and 57; 49, 51, and 55; 49 and 51; 51, 55, 57, 68, 89, 91, 94, 108, and 145; 51, 55, 57, 68, 89, 91, 94, and 108; 51, 55, 57, 68, 89, 91, and 94; 51, 55, 57, 68, 89, and 91; 51, 55, 57, 68, and 89; 55, 57, and 68; 55 and 57; 55, 57, 68, 89, 91, 94, 108, and 145; 55, 57, 68, 89, 91, 94, and 108; 55, 57, 68, 89, 91, and 94; 55, 57, 68, 89, 91, and 94; 55, 57, 68, 89, and 91; 55, 57, 68, and 89; 55, 57, and 68; 55 and 57; 57, 68, 89, 91, 94, 108, and 145; 57, 68, 89, 91, 94, and 108; 57, 68, 89, 91, and 94; 57, 68, 89, and 91; 57, 68, and 89; 57 and 68; 68, 89, 91, 94, 108, and 145; 68, 89, 91, 94, and 108; 68, 89, 91, and 94; 68, 89, and 91; 68 and 89; 89, 91, 94, 108, and 145; 89, 91, 94, and 108; 89, 91, and 94; 89 and 91; 91, 94, 108, and 145; 91, 94, and 108; 91, and 94; or 94 and 108. Each mutation can be combined with one another. The same substitutions can be made in SEQ ID NO: 6, but the numbering would adjusted appropriately as is clear from the present disclosure (20 less than the numbering for SEQ ID NO: 15 corresponds to the positions in SEQ ID NO: 6).

[0247] In some embodiments, the IL-2 mutein comprises a mutation at one or more positions of 35, 36, 42, 104, 115, or 146 that correspond to SEQ ID NO: 15 or the equivalent positions at SEQ ID NO: 6 (e.g., positions 15, 16, 22, 84, 95, or 126). These mutations can be combined with the other leucine to isoleucine mutations described herein or the mutation at positions 73, 76, 100, or 138 that correspond to SEQ ID NO: 15 or at one or more of positions 53, 56, 80, or 118 that correspond to SEQ ID NO: 6. In some embodiments, the mutation is a E35Q, H36N, Q42E, D104N, E115Q, or Q146E, or any combination thereof. In some embodiments, one or more of these substitutions is wild-type. In some embodiments, the mutein comprises a wild-type residue at one or more of positions 35, 36, 42, 104, 115, or 146 that correspond to SEQ ID NO: 15 or the equivalent positions at SEQ ID NO: 6 (e.g., positions 15, 16, 22, 84, 95, and 126).

[0248] The mutations at these positions can be combined with any of the other mutations described herein, including, but not limited to substitutions at positions 73, 76, 100, or 138 that correspond to SEQ ID NO: 15 or positions at one or more of positions 53, 56, 80, or 118 that correspond to SEQ ID NO: 6 described herein and above. In some embodiments, the IL-2 mutein comprises a N49S mutation that corresponds to SEQ ID NO: 15. In some embodiments, the IL-2 mutein comprises a Y51S or a Y51H mutation that corresponds to SEQ ID NO: 15. In some embodiments, the IL-2 mutein comprises a K55R mutation that corresponds to SEQ ID NO: 15. In some embodiments, the IL-2 mutein comprises a T57A mutation that corresponds to SEQ ID NO: 15. In some embodiments, the IL-2 mutein comprises a K68E mutation that corresponds to SEQ ID NO: 15. In some embodiments, the IL-2 mutein comprises a V89A mutation that corresponds to SEQ ID NO: 15. In some embodiments, the IL-2 mutein comprises a N91R mutation that corresponds to SEQ ID NO: 15. In some embodiments, the IL-2 mutein comprises a Q94P mutation that corresponds to SEQ ID NO: 15. In some embodiments, the IL-2 mutein comprises a N108D or a N108R mutation that corresponds to SEQ ID NO: 15. In some embodiments, the IL-2 mutein comprises a C145A or C145S mutation that corresponds to SEQ ID NO: 15. These substitutions can be used alone or in combination with one another. In some embodiments, the mutein comprises each of these substitutions. In some embodiments, the mutein comprises 1, 2, 3, 4, 5, 6, 7, or 8 of these mutations. In some embodiments, the mutein comprises a wild-type residue at one or more of positions 35, 36, 42, 104, 115, or 146 that correspond to SEQ ID NO: 15 or the equivalent positions at SEQ ID NO: 6 (e.g. positions 15, 16, 22, 84, 95, and 126).

[0249] In some embodiments, the IL-2 mutein comprises a N29S mutation that corresponds to SEQ ID NO: 6. In some embodiments, the IL-2 mutein comprises a Y31S or a Y31H mutation that corresponds to SEQ ID NO: 6. In some embodiments, the IL-2 mutein comprises a K35R mutation that corresponds to SEQ ID NO: 6. In some embodiments, the IL-2 mutein comprises a T37A mutation that corresponds to SEQ ID NO: 6. In some embodiments, the IL-2 mutein comprises a K48E mutation that corresponds to SEQ ID NO: 6. In some embodiments, the IL-2 mutein comprises a V69A mutation that corresponds to SEQ ID NO: 6. In some embodiments, the IL-2 mutein comprises a N71R mutation that corresponds to SEQ ID NO: 6. In some embodiments, the IL-2 mutein comprises a Q74P mutation that corresponds to SEQ ID NO: 6. In some embodiments, the IL-2 mutein comprises a N88D or a N88R mutation that corresponds to SEQ ID NO: 6. In some embodiments, the IL-2 mutein comprises a C125A or C125S mutation that corresponds to SEQ ID NO: 6. These substitutions can be used alone or in combination with one another. In some embodiments, the mutein comprises 1, 2, 3, 4, 5, 6, 7, or 8 of these mutations. In some embodiments, the mutein comprises each of these substitutions. In some embodiments, the mutein comprises a wild-type residue at one or more of positions 35, 36, 42, 104, 115, or 146 that correspond to SEQ ID NO: 15 or the equivalent positions at SEQ ID NO: 6 (e.g., positions 15, 16, 22, 84, 95, and 126).

[0250] For any of the IL-2 muteins described herein, in some embodiments, one or more of positions 35, 36, 42, 104, 115, or 146 that correspond to SEQ ID NO: 15 or the equivalent positions at SEQ ID NO: 6 (e.g., positions 15, 16, 22, 84, 95, or 126) are wild-type (e.g., are as shown in SEQ ID NOs: 6 or 15). In some embodiments, 2, 3, 4, 5, 6, or each of positions 35, 36, 42, 104, 115, or 146 that correspond to SEQ ID NO: 15 or the equivalent positions at SEQ ID NO: 6 (e.g., positions 15, 16, 22, 84, 95, and 126) are wild-type.

[0251] In some embodiments, the IL-2 mutein comprises a sequence of:

(SEQ ID NO: 16)
MYRMQLLSCIALSLALVTNSAPTSSSTKKTQLQLEHLLLDL
QMILNGISNHKNPRLARMLTFKFYMPEKATEIKHLQCLEEE
LKPLEEALRLAPSKNFHLRPRDLISDINVIVLELKGSETTFMC
EYADETATIVEFLNRWITFSQSIISTLT

[0252] In some embodiments, the IL-2 mutein comprises a sequence of:

(SEQ ID NO: 17)
MYRMQLLSCIALSLALVTNSAPTSSSTKKTQLQLEHLLLDL
QMILNGISNHKNPRLARMLTFKFYMPEKATELKHIQCLEEE
LKPLEEALRLAPSKNFHLRPRDLISDINVIVLELKGSETTFMC
EYADETATIVEFLNRWITFSQSIISTLT

[0253] In some embodiments, the IL-2 mutein comprises a sequence of:

(SEQ ID NO: 18)
MYRMQLLSCIALSLALVTNSAPTSSSTKKTQLQLEHLLLDL
QMILNGISNHKNPRLARMLTFKFYMPEKATELKHLQCLEEE
LKPLEEALRLAPSKNFHIRPRDLISDINVIVLELKGSETTFMC
EYADETATIVEFLNRWITFSQSIISTLT

[0254] In some embodiments, the IL-2 mutein comprises a sequence of:

(SEQ ID NO: 19)
MYRMQLLSCIALSLALVTNSAPTSSSTKKTQLQLEHLLLDL
QMILNGISNHKNPRLARMLTFKFYMPEKATELKHLQCLEEE
LKPLEEALRLAPSKNFHLRPRDLISDINVIVLELKGSETTFMC
EYADETATIVEFINRWITFSQSIISTLT

[0255] In some embodiments, the IL-2 mutein sequences described herein do not comprise the IL-2 leader sequence. The IL-2 leader sequence can be represented by the sequence of MYRMQLLSCIALSLALVTNS (SEQ ID NO: 20). Therefore, in some embodiments, the sequences illustrated above can also encompass peptides without the leader sequence. Although SEQ ID NOs; 16-20 are illustrated with only mutation at one of positions 73, 76, 100, or 138 that correspond to SEQ ID NO: 15 or positions at one or more of positions 53, 56, 80, or 118 that correspond to SEQ ID NO: 6, the peptides can comprises one, two, three or 4 of the mutations at these positions. In some embodiments, the substitution at each position is isoleucine or other type of conservative amino acid substitution. In some embodiments, the leucine at the recited positions are substituted with, independently, isoleucine, valine, methionine, or phenylalanine.

[0256] In some embodiments, the IL-2 mutein molecule is fused to a Fc Region or other linker region as described herein. Examples of such fusion proteins can be found in U.S. Pat. Nos. 9,580,486, 7,105,653, 9,616,105, 9,428,567, US2017/0051029, WO2016/164937, US2014/0286898A1, WO2014153111A2, WO2010/085495, WO2016014428A2, WO2016025385A1, US2017/0037102, and US2006/0269515, each of which are incorporated by reference in its entirety.

[0257] In some embodiments, the Fc region comprises what is known as the LALA mutation. Using the Kabat numbering of the Fc region, this would correspond to L247A, L248A, and G250A. In some embodiments, using the EU numbering of the Fc region, the Fc region comprises a L234A mutation, a L235A mutation, and/or a G237A mutation. Regardless of the numbering system used, in some embodiments, the Fc portion can comprise mutations that correspond to these residues. In some embodiments, the Fc region comprises N297G or N297A (Kabat numbering) mutations. The Kabat numbering is based upon a full-length sequence, but would be used in a fragment based upon a traditional alignment used by one of skill in the art for the Fc region.

[0258] In some embodiments, the Fc region comprises a sequence of:

(SEQ ID NO: 21)
DKTHTCPPCPAPEAAGAPSVFLFPPKPKDTLMISRTPEVTCV
VVDVSHEDPEVKFNWYVDGVEVHNAKTKPREEQYNSTYR
VVSVLTVLHQDWLNGKEYKCKVSNKALPAPIEKTISKAKG
QPREPQVYTLPPSREEMTKNQVSLTCLVKGFYPSDIAVEWE
SNGQPENNYKTTPPVLDSDGSFFLYSKLTVDKSRWQQGNV
FSCSVMHEALHNHYTQKSLSLSPG.
or
(SEQ ID NO: 28)
DKTHTCPPCPAPELLGGPSVFLFPPKPKDTLMISRTPEVTCV
WDVSHEDPEVKFNWYVDGVEVHNAKTKPREEQYNSTYR
VVSVLTVLHQDWLNGKEYKCKVSNKALPAPIEKTISKAKG
QPREPQVYTLPPSREEMTKNQVSLTCLVKGFYPSDIAVEWE
SNGQPENNYKTTPPVLDSDGSFFLYSKLTVDKSRWQQGNV
FSCSVMHEALHNHYTQKSLSLSPG.

[0259] In some embodiments, the IL-2 mutein is linked to the Fc region. Non-limiting examples of linkers are glycine/serine linkers. For example, a glycine/serine linkers can be a sequence of GGGGSGGGGSGGGGSGGGGS (SEQ ID NO: 22) or GGGGSGGGGSGGGGS (SEQ ID NO: 30). This is simply a non-limiting example and the linker can have varying number of GGGGS (SEQ ID NO: 23) or GGGGA repeats (SEQ ID NO: 29). In some embodiments, the linker comprises 1, 2, 3, 4, 5, 6, 7, 8, 9, or 10 of the GGGGS (SEQ ID NO: 23) or GGGGA (SEQ ID NO: 29) repeats.

[0260] Thus, the IL-2/Fc fusion can be represented by the formula of Z_{IL-2M}-L_{gs}-Z_{Fc}, wherein Z_{IL-2M} is a IL-2 mutein as described herein, L_{g}s is a linker sequence as described herein (e.g., glycine/serine linker) and Z_{Fc} is a Fc region described herein or known to one of skill in the art. In some embodiments, the formula can be in the reverse orientation Z_{Fc}-L_{gs}-Z_{IL-2M}.

[0261] In some embodiments, the IL-2/Fc fusion comprises a sequence of

(SEQ ID NO: 24)
MYRMQLLSCIALSLALVTNSAPTSSSTKKTQLQLEHLLLDL
QMILNGISNHKNPRLARMLTFKFYMPEKATEIKHLQCLEEE
LKPLEEALRLAPSKNFHLRPRDLISDINVIVLELKGSETTFMC
EYADETATIVEFLNRWITFSQSIISTLTGGGGSGGGGSGGGG
SGGGGSDKTHTCPPCPAPEAAGAPSVFLFPPKPKDTLMISRT
PEVTCVVVDVSHEDPEVKFNWYVDGVEVHNAKTKPREEQ
YNSTYRVVSVLTVLHQDWLNGKEYKCKVSNKALPAPIEKT
ISKAKGQPREPQVYTLPPSREEMTKNQVSLTCLVKGFYPSDI
AVEWESNGQPENNYKTTPPVLDSDGSFFLYSKLTVDKSRW
QQGNVFSCSVMHEALHNHYTQKSLSLSPG
(SEQ ID NO: 25)
MYRMQLLSCIALSLALVTNSAPTSSSTKKTQLQLEHLLLDL
QMILNGISNHKNPRLARMLTFKFYMPEKATELKHIQCLEEE
LKPLEEALRLAPSKNFHLRPRDLISDINVIVLELKGSETTFMC
EYADETATIVEFLNRWITFSQSIISTLTGGGGSGGGGSGGGG
SGGGGSDKTHTCPPCPAPEAAGAPSVFLFPPKPKDTLMISRT
PEVTCVVVDVSHEDPEVKFNWYVDGVEVHNAKTKPREEQ
YNSTYRVVSVLTVLHQDWLNGKEYKCKVSNKALPAPIEKT
ISKAKGQPREPQVYTLPPSREEMTKNQVSLTCLVKGFYPSDI
AVEWESNGQPENNYKTTPPVLDSDGSFFLYSKLTVDKSRW
QQGNVFSCSVMHEALHNHYTQKSLSLSPG
(SEQ ID NO: 26)
MYRMQLLSCIALSLALVTNSAPTSSSTKKTQLQLEHLLLDL
QMILNGISNHKNPRLARMLTFKFYMPEKATELKHLQCLEEE
LKPLEEALRLAPSKNFHIRPRDLISDINVIVLELKGSETTFMC
EYADETATIVEFLNRWITFSQSIISTLTGGGGSGGGGSGGGG
SGGGGSDKTHTCPPCPAPEAAGAPSVFLFPPKPKDTLMISRT
PEVTCVVVDVSHEDPEVKFNWYVDGVEVHNAKTKPREEQ
YNSTYRVVSVLTVLHQDWLNGKEYKCKVSNKALPAPIEKT
ISKAKGQPREPQVYTLPPSREEMTKNQVSLTCLVKGFYPSDI
AVEWESNGQPENNYKTTPPVLDSDGSFFLYSKLTVDKSRW
QQGNVFSCSVMHEALHNHYTQKSLSLSPG
(SEQ ID NO: 27)
MYRMQLLSCIALSLALVTNSAPTSSSTKKTQLQLEHLLLDL
QMILNGISNHKNPRLARMLTFKFYMPEKATELKHLQCLEEE
LKPLEEALRLAPSKNFHLRPRDLISDINVIVLELKGSETTFMC
EYADETATIVEFINRWITFSQSIISTLTGGGGSGGGGSGGGGS
GGGGSDKTHTCPPCPAPEAAGAPSVFLFPPKPKDTLMISRTP
EVTCVVVDVSHEDPEVKFNWYVDGVEVHNAKTKPREEQY
NSTYRVVSVLTVLHQDWLNGKEYKCKVSNKALPAPIEKTIS
KAKGQPREPQVYTLPPSREEMTKNQVSLTCLVKGFYPSDIA
VEWESNGQPENNYKTTPPVLDSDGSFFLYSKLTVDKSRWQ
QGNVFSCSVMHEALHNHYTQKSLSLSPG.

[0262] In some embodiments, the IL-2/Fc fusion comprises a sequence selected from the following table, Table 2:

TABLE 2
IL-2/Fc Fusion Protein Amino Acid Sequences

| Sequence | |
|---|---|
| Identification | Sequence |
| SEQ ID NO: 7 | APTSSSTKKTQLQLEHLLLDLQMILNGINNYKNPKLTRMLTFKFYMPKKATELKHLQCLEE |
| | ELKPLEEVLNLAQSKNFHLRPRDLISRINVIVLELKGSETTFMCEYADETATIVEFLNRWI |
| | TFSQSIISTLTGGGGAGGGGDKTHTCPPCPAPELLGGPSVFLFPPKPKDTLMISRTPEVTC |
| | VVVDVSHEDPEVKFNWYVDGVEVHNAKTKPREEQYASTYRVVSVLTVLHQDWLNGKEYKCK |
| | VSNKALPAPIEKTISKAKGQPREPQVYTLPPSRDELTKNQVSLTCLVKGFYPSDIAVEWES |
| | NGQPENNYKTTPPVLDSDGSFFLYSKLTVDKSRWQQGNVFSCSVMHEALHNHYTQKSLSLS |
| | PGK |
| SEQ ID NO: 8 | APTSSSTKKTQLQLEHLLLHLQMILNGINNYKNPKLTRMLTFKFYMPKKATELKHLQCLEE |
| | ELKPLEEVLNLAQSKNFHLRPRDLISNINVIVLELKGSETTFMCEYADETATIVEFLNRWI |
| | TFSQSIISTLTVECPPCPAPPVAGPSVFLFPPKPKDTLMISRTPEVTCVVVDVSHEDPEVQ |
| | FNWYVDGVEVHNAKTKPREEQFNSTFRVVSVLTVVHQDWLNGKEYKCKVSNKGLPAPIEKT |
| | ISKTKGQPREPQVYTLPPSREEMTKNQVSLTCLVKGFYPSDIAVEWESNGQPENNYKTTPP |
| | MLDSDGSFFLYSKLTVDKSRWQQGNVFSCSVMHEALHNHYTQKSLSLSPGK |
| SEQ ID NO: 9 | APTSSSTKKTQLQLEHLLLDLQMILNGINNYKNPKLTRMLTFKFYMPKKATELKHLQCLEE |
| | ELKPLEEVLNLAQSKNFHLRPRDLISRINVIVLELKGSETTFMCEYADETATIVEFLNRWI |
| | TFSQSIISTLTDKTHTCPPCPAPELLGGPSVFLFPPKPKDTLMISRTPEVTCVVVDVSHED |
| | PEVKFNWYVDGVEVHNAKTKPREEQYASTYRVVSVLTVLHQDWLNGKEYKCKVSNKALPAP |
| | IEKTISKAKGQPREPQVYTLPPSRDELTKNQVSLTCLVKGFYPSDIAVEWESNGQPENNYK |
| | TTPPVLDSDGSFFLYSKLTVDKSRWQQGNVFSCSVMHEALHNHYTQKSLSLSPG |
| SEQ ID NO: 10 | APTSSSTKKTQLQLEHLLLDLQMILNGINNYKNPKLTRMLTFKFYMPKKATELHKLQCLEE |
| | ELKPLEEVLNLAQSKNFHLRPRDLISRINVIVLELKGSETTFMCEYADETATIVEFLNRWI |
| | TFSQSIISTLTGGGGSDKTHTCPPCPAPELLGGPSVFLFPPKPKDTLMISRTPEVTCVVVD |
| | VSHEDPEVKFNWYVDGVEVHNAKTKPREEQYASTYRVVSVLTVLHQDWLNGKEYKCKVSNK |
| | ALPAPIEKTISKAKGQPREPQVYTLPPSRDELTKNQVSLTCLVKGFYPSDIAVEWESNGQP |
| | ENNYKTTPPVLDSDGSFFLYSKLTVDKSRWQQGNVFSCSVMHEALHNHYTQKSLSLSPG |
| SEQ ID NO: 11 | APTSSSTKKTQLQLEHLLLDLQMILNGINNYKNPKLTRMLTFKFYMPKKATELKHLQCLEE |
| | ELKPLEEVLNLAQSKNFHLRPRDLISRINVIVLELKGSETTFMCEYADETATIVEFLNRWI |
| | TFSQSIISTLTGGGGSGGGGSDKTHTCPPCPAPELLGGPSVFLFPPKPKDTLMISRTPEVT |
| | CVVVDVSHEDPEVKFNWYVDGVEVHNAKTKPREEQYASTYRVVSVLTVLHQDWLNGKEYKC |
| | KVSNKALPAPIEKTISKAKGQPREPQVYTLPPSRDELTKNQVSLTCLVKGFYPSDIAVEWE |
| | SNGQPENNYKTTPPVLDSDGSFFLYSKLTVDKSRWQQGNVFSCSVMHEALHNHYTQKSLSL |
| | SPG |
| SEQ ID NO: 12 | APTSSSTKKTQLQLEHLLLDLQMILNGINNYKNPKLTRMLTFKFYMPKKATELKHLQCLEE |
| | ELKPLEEVLNLAQSKNFHLRPRDLISRINVIVLELKGSETTFMCEYADETATIVEFLNRWI |
| | TFSQSIISTLTGGGGSGGGGSGGGGSDKTHTCPPCPAPELLGGPSVFLFPPKPKDTLMISR |
| | TPEVTCVVVDVSHEDPEVKFNWYVDGVEVHNAKTKPREEQYASTYRVVSVLTVLHQDWLNG |
| | KEYKCKVSNKALPAPIEKTISKAKGQPREPQVYTLPPSRDELTKNQVSLTCLVKGFYPSDI |
| | AVEWESNGQPENNYKTTPPVLDSDGSFFLYSKLTVDKSRWQQGNVFSCSVMHEALHNYHTQ |
| | KSLSLSPG |
| SEQ ID NO: 13 | APTSSSTKKTQLQLEHLLLDLQMILNGINNYKNPKLTRMLTFKFYMPKKATELKHLQCLEE |
| | ELKPLEEVLNLAQSKNFHLRPRDLISRINVIVLELKGSETTFMCEYADETATIVEFLNRWI |
| | TFSQSIISTLTGGGGSGGGGSGGGGSGGGGSDKTHTCPPCPAPELLGGPSVFLFPPKPKDT |
| | LMISRTPEVTCVVVDVSHEDPEVKFNWYVDGVEVHNAKTKPREEQYASTYRVVSVLTVLHQ |
| | DWLNGKEYKCKVSNKALPAPIEKTISKAKGQPREPQVYTLPPSRDELTKNQVSLTCLVKGF |
| | YPSDIAVEWESNGQPENNYKTTPPVLDSDGSFFLYSKLTVDKSRWQQGNVFSCSVMHEALH |
| | NHYTQKSLSLSPG |
| SEQ ID NO: 14 | APTSSSTKKTQLQLEHLLLHLQMILNGINNYKNPKLTRMLTFKFYMPKKATELKHLQCLEE |
| | ELKPLEEVLNLAQSKNFHLRPRDLISNINVIVLELKGSETTFMCEYADETATIVEFLNRWI |
| | TFSQSIISTLTGGGGSGGGGSGGGGSDKTHTCPPCPAPELLGGPSVFLFPPKPKDTLMISR |
| | TPEVTCVVVDVSHEDPEVKFNWYVDGVEVHNAKTKPREEQYASTYPVVSVLTVLHQDWLNG |
| | KEYKCKVSNKALPAPIEKTISKAKGQPREPQVYTLPPSRDELTKNQVSLTCLVKGFYPSDI |
| | AVEWESNGQPENNYKTTPPVLDSDGSFFLYSKLTVDKSRWQQGNVFSCSVMHEALHNHYTQ |
| | KSLSLSPG |

[0263] In some embodiments, the IL-2 muteins comprises one or more of the sequences provided in the following table, which, in some embodiments, shows the IL-2 mutein fused with other proteins or linkers. The table also provides sequences for a variety of Fc domains or variants that the IL-2 can be fused with:

| SEQ ID | Brief | |
|---|---|---|
| NO: | Description | Amino Acid Sequence |
| 31 | Human IL-2 | APTSSSTKKTQLQLEHLLLDLQMILNGINNYKNPKLTRMLTFKFYMPKKA |
| | with C125S | TELKHLQCLEEELKPLEEVLNLAQSKNFHLRPRDLISNINVIVLELKGSE |
| | mutation | TTFMCEYADETATIVEFLNRWITFSQSIISTLT |
| 32 | Human IL-2 | APASSSTKKTQLQLEHLLLDLQMILNGINNYKNPKLTRMLTFKFYMPKKA |
| | with C125S | TELKHLQCLEEELKPLEEVLNLAQSKNFHLRPRDLISNINVIVLELKGSE |
| | and T3A | TTFMCEYADETATIVEFLNRWITFSQSIISTLT |
| | mutations | |
| 33 | Human IL-2 | APTSSSTKKTQLQLEHLLLDLQMILNGINNYKNPKLTRMLTFKFYMPKKA |
| | with N88R and | TELKHLQCLEEELKPLEEVLNLAQSKNFHLRPRDLISRINVIVLELKGSE |
| | C125S | TTFMCEYADETATIVEFLNRWITFSQSIISTLT |
| 34 | Human IL-2 | APTSSSTKKTQLQLEHLLLDLQMILNGINNYKNPKLTRMLTFKFYMPKKA |
| | with V69A, | TELKHLQCLEEELKPLEEALNLAPSKNFHLRPRDLISNINVIVLELKGSE |
| | Q74P and | TTFMCEYADETATIVEFLNRWITFSQSIISTLT |
| | C125S | |
| | mutations | |
| 35 | Human IL-2 | APTSSSTKKTQLQLEHLLLDLQMILNGINNYKNPKLTRMLTFKFYMPKKA |
| | with V69A, | TELKHLQCLEEELKPLEEALNLAPSKNFHLRPRDLISDINVIVLELKGSE |
| | Q74P, N88D | TTFMCEYADETATIVEFLNRWITFSQSIISTLT |
| | and C125S | |
| | mutations | |
| 36 | Human IL-2 | APTSSSTKKTQLQLEHLLLDLQMILNGINNYKNPKLTRMLTFKFYMPKKA |
| | with V69A, | TELKHLQCLEEELKPLEEALNLAPSKNFHLRPRDLISRINVIVLELKGSE |
| | Q74P, N88R | TTFMCEYADETATIVEFLNRWITFSQSIISTLT |
| | and C125S | |
| | mutations | |
| 37 | Human IL-2 | APTSSSTKKTQLQLEHLLLDLQMILNGINNYKNPKLTRMLTFKFYMPKKA |
| | with N88D and | TELKHLQCLEEELKPLEEVLNLAQSKNFHLRPRDLISDINVIVLELKGSE |
| | C125S | TTFMCEYADETATIVEFLNRWITFSQSIISTLT |
| 38 | Human IL-2 | APTSSSTKKTQLQLEHLLLDLQMILNGINNYKNPKLTRMLTFKFYMPKKA |
| | with L53I, | TEIKHLQCLEEELKPLEEALNLAPSKNFHLRPRDLISDINVIVLELKGSE |
| | V69A, Q74P, | TTFMCEYADETATIVEFLNRWITFSQSIISTLT |
| | N88D and | |
| | C125S | |
| | mutations | |
| 39 | Human IL-2 | APTSSSTKKTQLQLEHLLLDLQMILNGINNYKNPKLTRMLTFKFYMPKKA |
| | with L56I, | TELKHIQCLEEELKPLEEALNLAPSKNFHLRPRDLISDINVIVLELKGSE |
| | V69A, Q74P, | TTFMCEYADETATIVEFLNRWITFSQSIISTLT |
| | N88D and | |
| | C125S | |
| | mutations | |
| 40 | Human IL-2 | APTSSSTKKTQLQLEHLLLDLQMILNGINNYKNPKLTRMLTFKFYMPKKA |
| | with V69A, | TELKHLQCLEEELKPLEEALNLAPSKNFHIRPRDLISDINVIVLELKGSE |
| | Q74P, L80I, | TTFMCEYADETATIVEFLNRWITFSQSIISTLT |
| | N88D and | |
| | C125S | |
| | mutations | |
| 41 | Human IL-2 | APTSSSTKKTQLQLEHLLLDLQMILNGINNYKNPKLTRMLTFKFYMPKKA |
| | with V69A, | TELKHLQCLEEELKPLEEALNLAPSKNFHLRPRDLISDINVIVLELKGSE |
| | Q74P, N88D, | TTFMCEYADETATIVEFINRWITFSQSIISTLT |
| | L118I, and | |
| | C125S | |
| | mutations | |
| 42 | Human IgG1 Fc | DKTHTCPPCPAPEAAGAPSVFLFPPKPKDTLMISRTPEVTCVVVDVSHED |
| | (N-terminal | PEVKFNWYVDGVEVHNAKTKPREEQYNSTYRVVSVLTVLHQDWLNGKEYK |
| | fusions) with | CKVSNKALPAPIEKTISKAKGQPREPQVYTLPPSREEMTKNQVSLTCLVK |
| | L234A, L235A, | GFYPSDIAVEWESNGQPENNYKTTPPVLDSDGSFFLYSKLTVDKSRWQQG |
| | and G237A | NVFSCSVMHEALHNHYTQKSLSLSPG |
| | mutations | |
| 30 | GGGGSGGGGSGGG | GGGGSGGGGSGGGGS |
| | GS linker (15 | |
| | amino acids) | |
| 22 | GGGGSGGGGSGGG | GGGGSGGGGSGGGGSGGGGS |
| | GSGGGGS | |
| | linker (20 | |
| | amino acids) | |
| 23 | GGGGS linker | GGGGS |
| | (5 amino | |
| | acids) | |
| 43 | Human IgG1 Fc | DKTHTCPPCPAPELLGGPSVFLFPPKPKDTLMISRTPEVTCVVVDVSHED |
| | (truncated) | PEVKFNWYVDGVEVHNAKTKPREEQYGSTYRVVSVLTVLHQDWLNGKEYK |
| | with N297G | CKVSNKALPAPIEKTISKAKGQPREPQVYTLPPSREEMTKNQVSLTCLVK |
| | mutation | GFYPSDIAVEWESNGQPENNYKTTPPVLDSDGSFFLYSKLTVDKSRWQQG |
| | | NVFSCSVMHEALHNHYTQKSLSLSPG |
| 44 | Antibody | ASTKGPSVFPLAPSSKSTSGGTAALGCLVKDYFPEPVTVSWNSGALTSGV |
| | Heavy Chain | HTFPAVLQSSGLYSLSSVVTVPSSSLGTQTYICNVNHKPSNTKVDKKVEP |
| | CH1-CH2-CH3 | KSCDKTHTCPPCPAPEAAGAPSVFLFPPKPKDTLMISRTPEVTCVVVDVS |
| | domains | HEDPEVKFNWYVDGVEVHNAKTKPREEQYNSTYRVVSVLTVLHQDWLNGK |
| | (human IgG1 | EYKCKVSNKALPAPIEKTISKAKGQPREPQVYTLPPSREEMTKNQVSLTC |
| | with L234A, | LVKGFYPSDIAVEWESNGQPENNYKTTPPVLDSDGSFFLYSKLTVDKSRW |
| | L235A, and | QQGNVFSCSVMHEALHNHYTQKSLSLSPG |
| | G237A) | |
| 45 | Antibody | RTVAAPSVFIFPPSDEQLKSGTASVVCLLNNFYPREAKVQWKVDNALQSG |
| | Kappa | NSQESVTEQDSKDSTYSLSSTLTLSKADYEKHKVYACEVTHQGLSSPVTK |
| | Constant | SFNRGEC |
| | Domain | |
| | (human) | |
| 46 | IL-2-G4Sx3-Fc | APTSSSTKKTQLQLEHLLLDLQMILNGINNYKNPKLTRMLTFKFYMPKKA |
| | | TELKHLQCLEEELKPLEEVLNLAQSKNFHLRPRDLISNINVIVLELKGSE |
| | | TTFMCEYADETATIVEFLNRWITFSQSIISTLTGGGGSGGGGSGGGGSDK |
| | | THTCPPCPAPEAAGAPSVFLFPPKPKDTLMISRTPEVTCVVVDVSHEDPE |
| | | VKFNWYVDGVEVHNAKTKPREEQYNSTYRVVSVLTVLHQDWLNGKEYKCK |
| | | VSNKALPAPIEKTISKAKGQPREPQVYTLPPSREEMTKNQVSLTCLVKGF |
| | | YPSDIAVEWESNGQPENNYKTTPPVLDSDGSFFLYSKLTVDKSRWQQGNV |
| | | FSCSVMHEALHNHYTQKSLSLSPG |
| 47 | IL-2 T3A- | APASSSTKKTQLQLEHLLLDLQMILNGINNYKNPKLTRMLTFKFYMPKKA |
| | G4Sx3-Fc | TELKHLQCLEEELKPLEEVLNLAQSKNFHLRPRDLISNINVIVLELKGSE |
| | | TTFMCEYADETATIVEFLNRWITFSQSIISTLTGGGGSGGGGSGGGGSDK |
| | | THTCPPCPAPEAAGAPSVFLFPPKPKDTLMISRTPEVTCVVVDVSHEDPE |
| | | VKFNWYVDGVEVHNAKTKPREEQYNSTYRVVSVLTVLHQDWLNGKEYKCK |
| | | VSNKALPAPIEKTISKAKGQPREPQVYTLPPSREEMTKNQVSLTCLVKGF |
| | | YPSDIAVEWESNGQPENNYKTTPPVLDSDGSFFLYSKLTVDKSRWQQGNV |
| | | FSCSVMHEALHNHYTQKSLSLSPG |
| 48 | IL-2 N88R- | APTSSSTKKTQLQLEHLLLDLQMILNGINNYKNPKLTRMLTFKFYMPKKA |
| | G4Sx3-Fc | TELKHLQCLEEELKPLEEVLNLAQSKNFHLRPRDLISRINVIVLELKGSE |
| | | TTFMCEYADETATIVEFLNRWITFSQSIISTLTGGGGSGGGGSGGGGSDK |
| | | THTCPPCPAPEAAGAPSVFLFPPKPKDTLMISRTPEVTCVVVDVSHEDPE |
| | | VKFNWYVDGVEVHNAKTKPREEQYNSTYRVVSVLTVLHQDWLNGKEYKCK |
| | | VSNKALPAPIEKTISKAKGQPREPQVYTLPPSREEMTKNQVSLTCLVKGF |
| | | YPSDIAVEWESNGQPENNYKTTPPVLDSDGSFFLYSKLTVDKSRWQQGNV |
| | | FSCSVMHEALHNHYTQKSLSLSPG |
| 49 | IL-2 V69A, | APTSSSTKKTQLQLEHLLLDLQMILNGINNYKNPKLTRMLTFKFYMPKKA |
| | Q74P,-G4Sx3- | TELKHLQCLEEELKPLEEALNLAPSKNFHLRPRDLISNINVIVLELKGSE |
| | Fc | TTFMCEYADETATIVEFLNRWITFSQSIISTLTGGGGSGGGGSGGGGSDK |
| | | THTCPPCPAPEAAGAPSVFLFPPKPKDTLMISRTPEVTCVVVDVSHEDPE |
| | | VKFNWYVDGVEVHNAKTKPREEQYNSTYRVVSVLTVLHQDWLNGKEYKCK |
| | | VSNKALPAPIEKTISKAKGQPREPQVYTLPPSREEMTKNQVSLTCLVKGF |
| | | YPSDIAVEWESNGQPENNYKTTPPVLDSDGSFFLYSKLTVDKSRWQQGNV |
| | | FSCSVMHEALHNHYTQKSLSLSPG |
| 50 | IL-2 N88D | APTSSSTKKTQLQLEHLLLDLQMILNGINNYKNPKLTRMLTFKFYMPKKA |
| | V69A, Q74P- | TELKHLQCLEEELKPLEEALNLAPSKNFHLRPRDLISDINVIVLELKGSE |
| | G4Sx3-Fc | TTFMCEYADETATIVEFLNRWITFSQSIISTLTGGGGSGGGGSGGGGSDK |
| | | THTCPPCPAPEAAGAPSVFLFPPKPKDTLMISRTPEVTCVVVDVSHEDPE |
| | | VKFNWYVDGVEVHNAKTKPREEQYNSTYRVVSVLTVLHQDWLNGKEYKCK |
| | | VSNKALPAPIEKTISKAKGQPREPQVYTLPPSREEMTKNQVSLTCLVKGF |
| | | YPSDIAVEWESNGQPENNYKTTPPVLDSDGSFFLYSKLTVDKSRWQQGNV |
| | | FSCSVMHEALHNHYTQKSLSLSPG |
| 51 | IL-2 N88R | APTSSSTKKTQLQLEHLLLDLQMILNGINNYKNPKLTRMLTFKFYMPKKA |
| | V69A, Q74P- | TELKHLQCLEEELKPLEEALNLAPSKNFHLRPRDLISRINVIVLELKGSE |
| | G4Sx3-Fc | TTFMCEYADETATIVEFLNRWITFSQSIISTLTGGGGSGGGGSGGGGSDK |
| | | THTCPPCPAPEAAGAPSVFLFPPKPKDTLMISRTPEVTCVVVDVSHEDPE |
| | | VKFNWYVDGVEVHNAKTKPREEQYNSTYRVVSVLTVLHQDWLNGKEYKCK |
| | | VSNKALPAPIEKTISKAKGQPREPQVYTLPPSREEMTKNQVSLTCLVKGF |
| | | YPSDIAVEWESNGQPENNYKTTPPVLDSDGSFFLYSKLTVDKSRWQQGNV |
| | | FSCSVMHEALHNHYTQKSLSLSPG |
| 52 | IL-2 N88D- | APTSSSTKKTQLQLEHLLLDLQMILNGINNYKNPKLTRMLTFKFYMPKKA |
| | G4Sx3-Fc | TELKHLQCLEEELKPLEEVLNLAQSKNFHLRPRDLISDINVIVLELKGSE |
| | | TTFMCEYADETATIVEFLNRWITFSQSIISTLTGGGGSGGGGSGGGGSDK |
| | | THTCPPCPAPEAAGAPSVFLFPPKPKDTLMISRTPEVTCVVVDVSHEDPE |
| | | VKFNWYVDGVEVHNAKTKPREEQYNSTYRVVSVLTVLHQDWLNGKEYKCK |
| | | VSNKALPAPIEKTISKAKGQPREPQVYTLPPSREEMTKNQVSLTCLVKGF |
| | | YPSDIAVEWESNGQPENNYKTTPPVLDSDGSFFLYSKLTVDKSRWQQGNV |
| | | FSCSVMHEALHNHYTQKSLSLSPG |
| 53 | IL-2 L53I | APTSSSTKKTQLQLEHLLLDLQMILNGINNYKNPKLTRMLTFKFYMPKKA |
| | N88D V69A, | TEIKHLQCLEEELKPLEEALNLAPSKNFHLRPRDLISDINVIVLELKGSE |
| | Q74P, C125S- | TTFMCEYADETATIVEFLNRWITFSQSIISTLTGGGGSGGGGSGGGGSGG |
| | G4Sx4-Fc | GGSDKTHTCPPCPAPEAAGAPSVFLFPPKPKDTLMISRTPEVTCVVVDVS |
| | | HEDPEVKFNWYVDGVEVHNAKTKPREEQYNSTYRVVSVLTVLHQDWLNGK |
| | | EYKCKVSNKALPAPIEKTISKAKGQPREPQVYTLPPSREEMTKNQVSLTC |
| | | LVKGFYPSDIAVEWESNGQPENNYKTTPPVLDSDGSFFLYSKLTVDKSRW |
| | | QQGNVFSCSVMHEALHNHYTQKSLSLSPG |
| 54 | IL-2 L56I | APTSSSTKKTQLQLEHLLLDLQMILNGINNYKNPKLTRMLTFKFYMPKKA |
| | N88D V69A, | TELKHIQCLEEELKPLEEALNLAPSKNFHLRPRDLISDINVIVLELKGSE |
| | Q74P, C125S- | TTFMCEYADETATIVEFLNRWITFSQSIISTLTGGGGSGGGGSGGGGSGG |
| | G4Sx4-Fc | GGSDKTHTCPPCPAPEAAGAPSVFLFPPKPKDTLMISRTPEVTCVVVDVS |
| | | HEDPEVKFNWYVDGVEVHNAKTKPREEQYNSTYRVVSVLTVLHQDWLNGK |
| | | EYKCKVSNKALPAPIEKTISKAKGQPREPQVYTLPPSREEMTKNQVSLTC |
| | | LVKGFYPSDIAVEWESNGQPENNYKTTPPVLDSDGSFFLYSKLTVDKSRW |
| | | QQGNVFSCSVMHEALHNHYTQKSLSLSPG |
| 55 | IL-2 L80I | APTSSSTKKTQLQLEHLLLDLQMILNGINNYKNPKLTRMLTFKFYMPKKA |
| | N88D V69A, | TELKHLQCLEEELKPLEEALNLAPSKNFHIRPRDLISDINVIVLELKGSE |
| | C125S Q74P- | TTFMCEYADETATIVEFLNRWITFSQSIISTLTGGGGSGGGGSGGGGSGG |
| | G4Sx4-Fc | GGSDKTHTCPPCPAPEAAGAPSVFLFPPKPKDTLMISRTPEVTCVVVDVS |
| | | HEDPEVKFNWYVDGVEVHNAKTKPREEQYNSTYRVVSVLTVLHQDWLNGK |
| | | EYKCKVSNKALPAPIEKTISKAKGQPREPQVYTLPPSREEMTKNQVSLTC |
| | | LVKGFYPSDIAVEWESNGQPENNYKTTPPVLDSDGSFFLYSKLTVDKSRW |
| | | QQGNVFSCSVMHEALHNHYTQKSLSLSPG |
| 56 | IL-2 L118I | APTSSSTKKTQLQLEHLLLDLQMILNGINNYKNPKLTRMLTFKFYMPKKA |
| | N88D V69A, | TELKHLQCLEEELKPLEEALNLAPSKNFHLRPRDLISDINVIVLELKGSE |
| | Q74P, C125S- | TTFMCEYADETATIVEFINRWITFSQSIISTLTGGGGSGGGGSGGGGSGG |
| | G4Sx4-Fc | GGSDKTHTCPPCPAPEAAGAPSVFLFPPKPKDTLMISRTPEVTCVVVDVS |
| | | HEDPEVKFNWYVDGVEVHNAKTKPREEQYNSTYRVVSVLTVLHQDWLNGK |
| | | EYKCKVSNKALPAPIEKTISKAKGQPREPQVYTLPPSREEMTKNQVSLTC |
| | | LVKGFYPSDIAVEWESNGQPENNYKTTPPVLDSDGSFFLYSKLTVDKSRW |
| | | QQGNVFSCSVMHEALHNHYTQKSLSLSPG |
| 57 | IL-2 N88D | APTSSSTKKTQLQLEHLLLDLQMILNGINNYKNPKLTRMLTFKFYMPKKA |
| | V69A, Q74P- | TELKHLQCLEEELKPLEEALNLAPSKNFHLRPRDLISDINVIVLELKGSE |
| | G4Sx4-Fc | TTFMCEYADETATIVEFLNRWITFSQSIISTLTGGGGSGGGGSGGGGSGG |
| | | GGSDKTHTCPPCPAPEAAGAPSVFLFPPKPKDTLMISRTPEVTCVVVDVS |
| | | HEDPEVKFNWYVDGVEVHNAKTKPREEQYNSTYRVVSVLTVLHQDWLNGK |
| | | EYKCKVSNKALPAPIEKTISKAKGQPREPQVYTLPPSREEMTKNQVSLTC |
| | | LVKGFYPSDIAVEWESNGQPENNYKTTPPVLDSDGSFFLYSKLTVDKSRW |
| | | QQGNVFSCSVMHEALHNHYTQKSLSLSPG |
| 58 | FC-G4S-IL-2 | DKTHTCPPCPAPELLGGPSVFLFPPKPKDTLMISRTPEVTCVVVDVSHED |
| | N88D V69A, | PEVKFNWYVDGVEVHNAKTKPREEQYGSTYRVVSVLTVLHQDWLNGKEYK |
| | Q74P | CKVSNKALPAPIEKTISKAKGQPREPQVYTLPPSREEMTKNQVSLTCLVK |
| | | GFYPSDIAVEWESNGQPENNYKTTPPVLDSDGSFFLYSKLTVDKSRWQQG |
| | | NVFSCSVMHEALHNHYTQKSLSLSPGGGGGSAPTSSSTKKTQLQLEHLLL |
| | | DLQMILNGINNYKNPKLTRMLTFKFYMPKKATELKHLQCLEEELKPLEEA |
| | | LNLAPSKNFHLRPRDLISDINVIVLELKGSETTFMCEYADETATIVEFLN |
| | | RWITFAQSIISTLT |
| 59 | IL-2 N88D | APTSSSTKKTQLQLEHLLLDLQMILNGINNYKNPKLTRMLTFKFYMPKKA |
| | V69A, Q74P, | TEX₁KHX₂QCLEEELKPLEEALNLAPSKNFHX₃RPRDLISDINVIVLELKG |
| | C125S-G4Sx4- | SETTFMCEYADETATIVEFX₄NRWITFSQSIISTLTGGGGSGGGGSGGGGS |
| | Fc, wherein | GGGGSDKTHTCPPCPAPEAAGAPSVFLFPPKPKDTLMISRTPEVTCVVVD |
| | at least one | VSHEDPEVKFNWYVDGVEVHNAKTKPREEQYNSTYRVVSVLTVLHQDWLN |
| | of X₁, X₂, X₃, | GKEYKCKVSNKALPAPIEKTISKAKGQPREPQVYTLPPSREEMTKNQVSL |
| | and X₄ is I | TCLVKGFYPSDIAVEWESNGQPENNYKTTPPVLDSDGSFFLYSKLTVDKS |
| | and the | RWQQGNVFSCSVMHEALHNHYTQKSLSLSPG |
| | remainder are | |
| | L or 1. | |
| 60 | IL-2 N88D | APTSSSTKKTQLQLEHLLLDLQMILNGINNYKNPKLTRMLTFKFYMPKKA |
| | V69A, Q74P, | TEX₁KHX₂QCLEEELKPLEEALNLAPSKNFHX₃RPRDLISDINVIVLELKG |
| | C125S, | SETTFMCEYADETATIVEFX₄NRWITFSQSIISTLT |
| | wherein at | |
| | least one of | |
| | X₁, X₂, X₃, | |
| | and X₄ is I | |
| | and the | |
| | remainder are | |
| | L or 1. | |

[0264] In some embodiments, the sequences shown in the table or throughout comprise or do not comprise one or more mutations that correspond to positions L53, L56, L80, and L118. In some embodiments, the sequences shown in the table or throughout the present application comprise or do not comprise one or more mutations that correspond to positions L59I, L63I, I24L, L94I, L96I or L132 I or other substitutions at the same positions. In some embodiments, the mutation is leucine to isoleucine. In some embodiments, the mutein does not comprise another mutation other than as shown or described herein. In some embodiments, the peptide comprises a sequence of SEQ ID NO: 31, SEQ ID NO: 32, SEQ ID NO: 33, SEQ ID NO: 34, SEQ ID NO: 35, SEQ ID NO: 36, SEQ ID NO: 37, SEQ ID NO: 38, SEQ ID NO: 39, SEQ ID NO: 40, SEQ ID NO: 41, SEQ ID NO: 42, SEQ ID NO: 43, SEQ ID NO: 44, SEQ ID NO: 45, SEQ ID NO: 46, SEQ ID NO: 47, SEQ ID NO: 48, SEQ ID NO: 49, SEQ ID NO: 50, SEQ ID NO: 51, SEQ ID NO: 52, SEQ ID NO: 53, SEQ ID NO: 54, SEQ ID NO: 55, or SEQ ID NO: 56, SEQ ID NO: 57, SEQ ID NO: 58, SEQ ID NO: 59, or SEQ ID NO: 60.

[0265] In some embodiments, the protein comprises a IL-2 mutein as provided for herein. In some embodiments, a polypeptide is provided comprising SEQ ID NO: 59 or SEQ ID NO: 60, wherein at least one of X₁, X₂, X₃, and X₄ is I and the remainder are L or I. In some embodiments, X₁, X₂, and X₃ are L and X₄ is I. In some embodiments, X₁, X₂, and X₄ are L and X₃ is I. In some embodiments, X₂, X₃, and X₄ are L and X₁ is I. In some embodiments, X₁, X₃, and X₄ are L and X₂ is I. In some embodiments, X₁ and X₂ are L and X₃ and X₄ are I. In some embodiments, X₁ and X₃ are L and X₂ and X₄ are I. In some embodiments, X₁ and X₄ are L and X₂ and X₃ are I. In some embodiments, X₂ and X₃ are L and X₁ and X₄ are I. In some embodiments, X₂ and X₄ are L and X₁ and X₃ are I. In some embodiments, X₃ and X₄ are L and X₁ and X₂ are I. In some embodiments, X₁, X₂, and X₃ are L and X₄ is I. In some embodiments, X₂, X₃, and X₄ are L and X₁ is I. In some embodiments, X₁, X₃, and X₄ are L and X₂ is I. In some embodiments, X₁, X₂, and X₄ are L and X₃ is I.

[0266] In some embodiments, the Fc portion of the fusion is not included. In some embodiments, the peptide consists essentially of a IL-2 mutein provided for herein. In some embodiments, the protein is free of a Fc portion.

[0267] For illustrative purposes only, embodiments of IL-2 mutein fused with a Fc and with a targeting moiety are illustrated in FIG. 19. The targeting moiety is illustrated as an anti-MAdCAM antibody, but that is for illustration purposes only and it can be replaced with another targeting moiety, such as an anti-desmoglein 1, 2, 3, or 4 antibody. Similarly, the IL-2 mutein can be replaced with a PD-1 agonist or other type of effector molecule.

[0268] In some embodiments, the IL-2 mutein is linked directly, or indirectly, to a PD-1 agonist. The sequences are for illustrative purposes only and are not intended to be limiting. In some embodiments, the compound comprises an amino acid sequence of SEQ ID NO: 53, 54, 55, or 56. In some embodiments, the compound comprises an amino acid sequence of SEQ ID NO: 53, 54, 55, or 56 with or without a C125A or C125S mutation. In some embodiments, the residue at position 125 is C, S, or A. In some embodiments, the compound comprises an amino acid sequence of SEQ ID NO: 59 or SEQ ID NO: 60, wherein at least one of X₁, X₂, X₃, and X₄ is I and the remainder are L or I. In some embodiments, the protein comprises a IL-2 mutein as provided for herein. In some embodiments, a polypeptide is provided comprising SEQ ID NO: 59 or SEQ ID NO: 60, wherein at least one of X₁, X₂, X₃, and X₄ is I and the remainder are L or I. In some embodiments, X₁, X₂, and X₃ are L and X₄ is I. In some embodiments, X₁, X₂, and X₄ are L and X₃ is I. In some embodiments, X₂, X₃, and X₄ are L and X₁ is I. In some embodiments, X₁, X₃, and X₄ are L and X₂ is I. In some embodiments, X₁ and X₂ are L and X₃ and X₄ are I. In some embodiments, X₁ and X₃ are L and X₂ and X₄ are I. In some embodiments, X₁ and X₄ are L and X₂ and X₃ are I. In some embodiments, X₂ and X₃ are L and X₁ and X₄ are I. In some embodiments, X₂ and X₄ are L and X₁ and X₃ are I. In some embodiments, X₃ and X₄ are L and X₁ and X₂ are I. In some embodiments, X₁, X₂, and X₃ are L and X₄ is I. In some embodiments, X₂, X₃, and X₄ are L and X₁ is I. In some embodiments, X₁, X₃, and X₄ are L and X₂ is I. In some embodiments, X₁, X₂, and X₄ are L and X₃ is I.

[0269] Each of the proteins may also be considered to have the C125S and the LALA and/or G237A mutations as provided for herein. The C125 substitution can also be C125A as described throughout the present application.

[0270] In an embodiment, an IL-2 mutein molecule comprises at least 60, 70, 80, 85, 90, 95, or 97% sequence identity or homology with a naturally occurring human IL-2 molecule, e.g., a naturally occurring IL-2 sequence disclosed herein or those that incorporated by reference.

[0271] As described herein the IL-2 muteins can be part of a bispecific molecule with a tethering moiety, such as an anti-desmoglein 1 antibody, an anti-desmoglein 2 antibody, an anti-desmoglein 3 antibody, or an anti-desmoglein 4 antibody that will target the IL-2 mutein to a desmoglein 1, 2, 3, or 4 expressing cell. As described herein, the bispecific molecule can be produced from two polypeptide chains.

[0272] In some embodiments, the following sequences or an anti-desmoglein 1 antibody, an anti-desmoglein 2 antibody, an anti-desmoglein 3 antibody, or an anti-desmoglein 4 antibody, or any antibody binding fragments thereof can comprise one or more of the following sequences:

(Anti-DSG1 variable domain; SEQ ID NO: 61)
QVQLQESGPGPVKPSGTLSLTCGVSGGSISSNHWWTWVRQPPGKGLEWI
GEIYHNGSTFLNPSLKSRVTISVDKSNNQFSLKLTSVTAADTAVYYCAR
GWHRTGFRGYPSHWYFDLWGRGTLVSVSS.
(Anti-DSG1 variable domain; SEQ ID NO: 62)
QSVLTQPPSVSGTPGQRVTISCSGSSSHIGSNYVYWYQQLPGTAPKILI
YSNDQRPAGVPDRFSASKSGTSASLAISGLRSEDEADYYCAAWDDGQGG
VFGGGTKLTVL.
(SEQ ID NO: 63)
QVQLVQSGAEVKKPGASVKVSCKASGYSFTTYYMHWVRQAPGQGLEWMG
IINPSGGSTSYAQKFQGRVTMTRDTSTSTVYMELSSLRSEDTAVYYCAS
GWVYWGQGTLVTVSSASTKGPSVFPLAPSSKSTSGGTAALGCLVKDYFP
EPVTVSWNSGALTSGVHTFPAVLQSSGLYSLSSVVTVPSSSLGTQTYIC
NVNHKPSNTKVDKKVEPKSCDKTHTCPPCPAPEAAGAPSVFLFPPKPKD
TLMISRTPEVTCVVVDVSHEDPEVKFNWYVDGVEVHNAKTKPREEQYNS
TYRVVSVLTVLHQDWLNGKEYKCKVSNKALPAPIEKTISKAKGQPREPQ
VYTLPPSREEMTKNQVSLTCLVKGFYPSDIAVEWESNGQPENNYKTTPP
VLDSDGSFFLYSKLTVDKSRWQQGNVFSCSVMHEALHNHYTQKSLSLSP
GGGGGSGGGGSGGGGSQSVLTQPPSVSGTPGQRVTISCSGSSSHIGSNY
VYWYQQLPGTAPKILIYSNDQRPAGVPDRFSASKSGTSASLAISGLRSE
DEADYYCAAWDDGQGGVFGGGTKLTVLGGGGSGGGGSGGGGSGGGGSQV
QLQESGPGPVKPSGTLSLTCGVSGGSISSNHWWTWVRQPPGKGLEWIGE
IYHNGSTFLNPSLKSRVTISVDKSNNQFSLKLTSVTAADTAVYYCARGW
HRTGFRGYPSHWYFDLWGRGTLVSVSS.
(SEQ ID NO: 64)
QVQLQESGPGPVKPSGTLSLTCGVSGGSISSNHWWTWVRQPPGKGLEWI
GEIYHNGSTFLNPSLKSRVTISVDKSNNQFSLKLTSVTAADTAVYYCAR
GWHRTGFRGYPSHWYFDLWGRGTLVSVSSASTKGPSVFPLAPSSKSTSG
GTAALGCLVKDYFPEPVTVSWNSGALTSGVHTFPAVLQSSGLYSLSSVV
TVPSSSLGTQTYICNVNHKPSNTKVDKKVEPKSCDKTHTCPPCPAPEAA
GAPSVFLFPPKPKDTLMISRTPEVTCVVVDVSHEDPEVKFNWYVDGVEV
HNAKTKPREEQYNSTYRVVSVLTVLHQDWLNGKEYKCKVSNKALPAPIE
KTISKAKGQPREPQVYTLPPSREEMTKNQVSLTCLVKGFYPSDIAVEWE
SNGQPENNYKTTPPVLDSDGSFFLYSKLTVDKSRWQQGNVFSCSVMHEA
LHNHYTQKSLSLSP.
(SEQ ID NO: 65)
QSVLTQPPSVSGTPGQRVTISCSGSSSHIGSNYVYWYQQLPGTAPKILI
YSNDQRPAGVPDRFSASKSGTSASLAISGLRSEDEADYYCAAWDDGQGG
VFGGGTKLTVLGQPKAAPSVTLFPPSSEELQANKATLVCLISDFYPGAV
TVAWKADSSPVKAGVETTTPSKQSNNKYAASSYLSLTPEQWKSHRSYSC
QVTHEGSTVEKTVAPTECS.

[0273] The linkers illustrated in the above sequences can be replaced with other linkers as described herein or known to one of skill in the art. Where the an anti-desmoglein 1 antibody, an anti-desmoglein 2 antibody, an anti-desmoglein 3 antibody, or an anti-desmoglein 4 antibody are linked to an IL-2 mutein, the IL-2 muteins can be produced with or without a C125A or C125S mutation in the IL-2 mutein. Examples of IL-2 muteins that can be included are illustrated herein, such as, but not limited to, a sequence of SEQ ID NO: 59 or SEQ ID NO: 60.

[0274] In some embodiments, the constant kappa domain in any of the light chains can be replaced with a constant lambda domain.

[0275] GITR-Binders

[0276] GITR (CD357) is a cell surface marker present on Tregs. Blockade of the GITR-GITRL interaction maintains Treg function. In some embodiments, a therapeutic compound comprises an IIC binding entity that binds GITR-expressing Treg cells and a targeting moiety that targets the therapeutic compound to the target tissue of interest.

[0277] In some embodiments, a therapeutic compound comprises an anti-GITR antibody molecule, e.g., anti-GITR antibody molecule that inhibit binding of GITR to GITRL.

[0278] In some embodiments, a therapeutic compound comprises an anti-GITR antibody molecule, anti-GITR antibody molecule that inhibit binding of GITR to GITRL, and PD-1 agonist, IL-2 mutein molecule, or other effector described herein.

[0279] While not wishing to be bound by theory, it is believed that the therapeutic compound that comprises a GITR binder effects accumulation of GITR-expressing Tregs at the site targeted by the targeting moiety of the therapeutic compound, e.g., a transplant or site of organ injury.

[0280] Butyrophilins/Butyrophilin-Like Molecules

[0281] Effector binding/modulating moiety can comprise an agonistic BTNL2 molecule. While not wishing to be bound by theory, it is believed that agonistic BTNL2 molecules induce Treg cells.

[0282] An agonistic BTNL2 molecule as that term as used herein, refers to a polypeptide having sufficient BTNL2 sequence that, as part of a therapeutic compound, it induces Treg cells. In some embodiments, a BTNL2 molecule has at least 60, 70, 80, 90, 95, 99, or 100% sequence identity, or substantial sequence identity, with a naturally occurring butyrophilin.

[0283] In some embodiments, an effector binding/modulating moiety is an antagonistic BTNL8 molecule.

### Therapeutic Compounds Comprising an SM Binding/Modulating Moiety: Manipulation of Local Microenvironment

[0284] A therapeutic compound can comprise an effector binding/modulating moiety that promotes an immunosuppressive local microenvironment, e.g., by providing in the proximity of the target, a substance that inhibits or minimizes attack by the immune system of the target, referred to herein a SM binding/modulating moiety.

[0285] In some embodiments, the SM binding/modulating moiety comprises a molecule that inhibits or minimizes attack by the immune system of the target (referred to herein as an SM binding/modulating moiety). In some embodiments, a therapeutic compound comprises an SM binding/modulating moiety that binds and accumulates a soluble substance, e.g., an endogenous or exogenous substance having immunosuppressive function. In some embodiments, a therapeutic compound comprises an SM binding/modulating moiety, e.g., a CD39 molecule or a CD73 molecule or alkaline phosphatase molecule, that binds, inhibits, sequesters, degrades or otherwise neutralizes a soluble substance, typically and endogenous soluble substance, e.g., ATP in the case of a CD39 molecule or alkaline phosphatase molecule, or AMP in the case of a CD73 molecule, that promotes immune attack. In some embodiments, a therapeutic compound comprises an SM binding/modulating moiety that comprises an immunosuppressive substance, e.g. a fragment of protein that is immunosuppressive.

### Therapeutic Compounds Comprising an ICSM Binding/Modulating Moiety: Inhibition of Stimulation, e.g., Inhibition of Co-Stimulation of Immune Cells

[0286] A therapeutic compound can comprise an ICSM binding/modulating moiety that inhibits or antagonizes a stimulatory, e.g., costimulatory binding pair, e.g., OX40 and OX40L. The ICSM binding/modulating moiety can bind and antagonize either member of the pair.

[0287] In an embodiment, the ICSM binding/modulating moiety comprises an antibody molecule that binds and antagonizes either member of a stimulatory, e.g., costimulatory binding pair. In an embodiment the ICSM binding/modulating moiety comprises antagonistic analog of one of the members of the binding pair. In such embodiments the ICSM binding/modulating moiety can comprise a soluble fragment of one of the members that binds the other. Typically the analog will have at least 50, 60, 70, 80, 90, 95, or 98% homology or sequence identity with a naturally occurring member that binds the target member of the pair. In the case of an ICSM binding/modulating moiety that binds the member present on the surface of an immune cell, the ICSM binding/modulating moiety typically binds but does not activate, or allow endogenous counter member to bind and activate.

[0288] Thus, in the case of the binding pair that includes, for example, the OX40 immune cell member and the OX40L counter member, an ICSM binding/modulating member can comprise any of the following:

[0289] a) an antibody molecule that binds the OX40 immune cell member and antagonizes stimulation, e.g., by blocking binding of endogenous OX40L counter member;

[0290] b) an antibody molecule that binds OX40L counter member and antagonizes stimulation, e.g., by blocking effective binding of the endogenous OX40L counter member to the OX40 immune cell member;

[0291] c) a soluble fragment or analog of OX40L counter member which binds OX40 immune cell member and antagonizes stimulation; and

[0292] c) a soluble fragment or analog of OX40 immune cell member which binds OX40L counter member and antagonizes stimulation.

[0293] For example, the ICSM binding/modulating moiety, e.g., an antibody molecule or an antagonistic analog or of the counter member, can bind to CD2, ICOS, CD40L, CD28, LFA1, SLAM, TIM1, CD30, OX40 (CD134), 41BB (CD137), CD27, HVEM, DR3, GITR, BAFFR, TACI, BCMA, CD30, or CD40. In another embodiment, the ICSM binding/modulating moiety, e.g., an antibody molecule or an antagonistic analog or of the counter member, can bind to B7.1, B7.2, ICOSL (B7-H2, B7RP1), LFA3, CD48, CD58, ICAM1, SLAM, TIM4, CD40, CD30L, OX40L (CD252), 41BBL (CD137L), CD70, LIGHT, TL1A, GITRL, BAFF, APRIL, CD30, or CD40L.

[0294] In some embodiments, the ICSM binding/modulating molecule binds, and antagonizes, an activating or costimulatory molecule, e.g., a costimulatory molecule, present on an immune cell, or binds the counter member preventing the counter member from activating the costimulatory molecule present on the immune cell. In some embodiments, the ICSM comprises an antagonistic antibody molecule e.g., an antibody molecule that binds the costimulatory molecule on an immune cell or binds the counter member of the ICSM, preventing the counter member from activating the costimulatory molecule on the immune cell, and results in inhibiting the activity of the costimulatory molecule. In some embodiments, the ICSM comprises an antagonistic counterpart molecule, e.g., a fragment of a molecule that binds the costimulatory molecule, and results in the inhibition of the costimulatory molecule activity.

[0295] In some embodiments, one member of the binding pair will be on the surface of an immune cell, e.g., a T, B, or NK cell or dendritic cell, while the counter member will be on another immune cell, or an APC such as a dendritic cell, or on non-immune cells such as smooth muscle cells, or endothelial cells.

[0296] The following table provides non-limiting examples of costimulatory molecule and counterstructure pairs.

TABLE 2
Costimulatory molecule and counterstructure pairs

| | Counterstructure |
|---|---|
| Costimulatory molecule | |
| (e.g., on T cells) | |
| CD28 | B7.1 or B7.2 |
| ICOS | ICOSL (B7H-2, |
| | B7RP1) |
| CD2 | LFA3, CD48, CD58 |
| LFA1 | ICAM1 |
| SLAM | SLAM |
| TIM1 | TIM4 |
| CD40L | CD40 |
| CD30 | CD30L |
| OX40/CD134 | OX40L (CD252) |
| 41BB/CD137 | 41BBL (CD137L) |
| CD27 | CD70 |
| HVEM | LIGHT |
| DR3 | TL1A |
| GITR | GITRL |
| Costimulatory molecule | |
| (e.g., on B cells) | |
| BAFFR | BAFF |
| TACI | BAFF and APRIL |
| BCMA | BAFF and APRIL |
| CD40 | CD40L |
| CD30L | CD30 |

### Donor Tissue

[0297] Therapeutic compounds and methods described herein can be used in conjunction with a transplantation of donor tissue into a subject and minimizes rejection of, minimizes immune effector cell mediated damage to, prolongs acceptance of, or prolongs the functional life of, donor transplant tissue. The tissue can be xenograft or allograft tissue. Transplanted tissue can comprise all or part of an organ, e.g., a liver, kidney, heart, pancreas, thymus, skin, or lung. In embodiments, therapeutic compounds described herein reduce, or eliminate the need for systemic immune suppression. Therapeutic compounds and methods described herein can also be used to treat GVHD. In some embodiments, host cells are coated with a therapeutic compound that comprises, as an effector binding/modulating moiety, a PD-L1 molecule.

[0298] Table 2A provides target molecules for transplant indications. A target molecule is the target to which a targeting moiety binds. As discussed elsewhere herein, in some embodiments, a targeting moiety is selected that binds a product of an allele present on donor tissue and which is not expressed by the subject (recipient) or at expressed at a different level (e.g., reduced or substantially reduced).

TABLE 2A
Target Molecules for Transplant Indications

| Indication | Organ/cell type | Target |
|---|---|---|
| Allograft transplant | All | HLA-A, HLA-B, HLA-C, |
| tissue, e.g., allograft | | HLA-DP, HLA-DQ, or |
| solid organ transplant, | | HLA-DR |
| GVHD | | |
| Transplant | Kidney | Antigens expressed in the |
| | | kidney where immune cells |
| | | infiltrate, for example |
| | | including but not limited to |
| | | the tubular interstitial region |
| | | e.g., uromodulin, SLC22A2, |
| | | SLC22A6, FXYD4, |
| | | SLC5A10, SLC6A13, AQP6, |
| | | SLC13A3, TMEM72, BSND, |
| | | NPR3, and the proximal and |
| | | distal tubular epithelium, |
| | | such as OAT1, OCT2 |

### Auto-Immune Disorders

[0299] Therapeutic compounds and methods described herein can be used to treat a subject having, or at risk for having, an unwanted autoimmune response, e.g., an autoimmune response in Type 1 diabetes, multiple sclerosis, cardiomyositis, vitiligo, alopecia, inflammatory bowel disease (IBD, e.g., Crohn's disease or ulcerative colitis), Sjogren's syndrome, focal segmented glomerular sclerosis (FSGS), scleroderma/systemic sclerosis (SSc) or rheumatoid arthritis. In some embodiments, the treatment minimizes rejection of, minimizes immune effector cell mediated damage to, prolongs the survival of subject tissue undergoing, or a risk for, autoimmune attack. Table 4 provides target molecules for several autoimmune indications and organ/cell types. A target molecule is the target to which a targeting moiety binds.

TABLE 4
Target Molecules for Autoimmune Indications

| Indication | Organ/cell type | Target Molecule |
|---|---|---|
| Type 1 diabetes and | Pancreas/pancreatic | SEZ6L2, LRP11, DISP2, |
| transplant | islets, beta cells | SLC30A8, FXYD2 TSPAN7 |
| | | TMEM27 (Hald et al 2012 |
| | | Diabetelogia 55: 154), |
| | | FXYD2, GPR119, HEPACAM2, |
| | | DPP6, or MAdCAM |
| Multiple sclerosis | CNS/myelin sheath of | MOG, PLP, MBP |
| | oligodendrocytes | |
| Cardiomyositis, rheumatoid | Cardiomyocytes, monocytes, | SIRPA (CD172a) |
| arthritis | macrophages, myeloid cells | |
| Inflammatory bowel disease | Intestine | MAdCAM |
| (ulcerative colitis, Crohn's | | |
| disease), GVHD, celiac | | |
| disease | | |
| Autoimmune hepatitis (AIH), | liver | MAdCAM |
| primary sclerosing | | |
| cholangitis (PSC, | | |
| primary biliary sclerosis | | |
| (PBC), transplant | | |
| Focal segmented glomerular | Kidney, podocytes, tubules, | COL1A1, cadherin 2, |
| sclerosis (FSGS) and other | epithelial cells | VCAM-1, Thy1, podocin, |
| diseases that can affect | | KIM1 (Hodgin et al Am J |
| kidney, for example lupus | | Pathol 177: 1675 2010), |
| nephritis, systemic | | PLA2R, OAT1, OCT2, |
| scleroderma, membranous | | K-cadherin 6 |
| glomerular nephropathy | | |
| (MGN), membranous | | |
| nephropathy (MN), minimal | | |
| change disease (MCD), IgA | | |
| nephropathy, ANCA- | | |
| associated vasculitis (AAV) | | |
| Sjogren's syndrome | Salivary glands, epithelial | FCGR3B, HLAB, KIM1 |
| | cells, kidney | (Hu et al Arth and |
| | | Rheum 56: 3588 2007) |
| Scleroderma, systemic | skin, kidney, lung, fibroblasts, | Collagen I, III, VI, VII, |
| sclerosis (SSc) | connective tissue | fibronectin (Wang et al Arth |
| | | and Rheum 54: 2271 2006) |
| vitiligo | Skin, epidermis, Langerhans | COL17A1, CD1A, CD207, |
| | cells, keratinocytes, | desmoglein 1-4, keratin 1 |
| | melanocytes | |
| Alopecia areata | Skin, hair follicle/hair bulb, | CD133 (Yang and Cotsarelis |
| | dermis | J Dermatol Sci 57: 2 2010) |

[0300] Other examples of autoimmune disorders and diseases that can be treated with the compounds described herein include, but are not limited to, myocarditis, postmyocardial infarction syndrome, postpericardiotomy syndrome, subacute bacterial endocarditis, anti-glomerular basement membrane nephritis, interstitial cystitis, lupus nephritis, membranous glomerulonephropathy, chronic kidney disease (“CKD”), autoimmune hepatitis, primary biliary cirrhosis, primary sclerosing cholangitis, antisynthetase syndrome, alopecia areata, autoimmune angioedema, autoimmune progesterone dermatitis, autoimmune urticaria, bullous pemphigoid, cicatricial pemphigoid, dermatitis herpetiformis, discoid lupus erythematosus, epidermolysis bullosa acquisita, erythema nodosum, gestational pemphigoid, hidradenitis suppurativa, lichen planus, lichen sclerosus, linear IgA disease (lad), morphea, pemphigus vulgaris, pityriasis lichenoides et varioliformis acuta, Mucha-Habermann disease, psoriasis, systemic scleroderma, vitiligo, Addison's disease, autoimmune polyendocrine syndrome (APS) type 1, autoimmune polyendocrine syndrome (APS) type 2, autoimmune polyendocrine syndrome (APS) type 3, autoimmune pancreatitis (AIP), diabetes mellitus type 1, autoimmune thyroiditis, Ord's thyroiditis, Graves' disease, autoimmune oophoritis, endometriosis, autoimmune orchitis, Sjogren's syndrome, autoimmune enteropathy, coeliac disease, Crohn's disease, microscopic colitis, ulcerative colitis, thrombocytopenia, adiposis, dolorosa, adult-onset Still's disease, ankylosing spondylitis, CREST syndrome, drug-induced lupus, enthesitis-related arthritis, eosinophilic fasciitis, Felty syndrome, IgG4-related disease, juvenile arthritis, Lyme disease (chronic), mixed connective tissue disease (MCTD), palindromic rheumatism, Parry Romberg syndrome, Parsonage-Turner syndrome, psoriatic arthritis, reactive arthritis, relapsing polychondritis, retroperitoneal fibrosis, rheumatic fever, rheumatoid arthritis, sarcoidosis, Schnitzler syndrome, systemic lupus erythematosus (SLE), undifferentiated connective tissue disease (UCTD), dermatomyositis, fibromyalgia, inclusion body myositis, myositis, myasthenia gravis, neuromyotonia, paraneoplastic cerebellar degeneration, polymyositis, acute disseminated encephalomyelitis (ADEM), acute motor axonal neuropathy, anti-N-methyl-D-aspartate (anti-NMDA) receptor encephalitis, Balo concentric sclerosis, Bickerstaff's encephalitis, chronic inflammatory demyelinating polyneuropathy, Guillain-Barre syndrome, Hashimoto's encephalopathy, idiopathic inflammatory demyelinating diseases, Lambert-Eaton myasthenic syndrome, multiple sclerosis, Oshtoran syndrome, pediatric autoimmune neuropsychiatric disorder associated with streptococcus (PANDAS), progressive inflammatory neuropathy, restless leg syndrome, stiff person syndrome, Sydenham chorea, transverse myelitis, autoimmune retinopathy, autoimmune uveitis, Cogan syndrome, Graves ophthalmopathy, intermediate uveitis, ligneous conjunctivitis, Mooren's ulcer, neuromyelitis optica, opsoclonus myoclonus syndrome, optic neuritis, scleritis, Susac's syndrome, sympathetic ophthalmia, Tolosa-Hunt syndrome, autoimmune inner ear disease (AIED), Meniere's disease, Behcet's disease, eosinophilic granulomatosis with polyangiitis (EGPA), giant cell arteritis, granulmatosis with polyangiitis (GPA), IgA vasculitis (IgAV), Kawasaki's disease, leukocytoclastic vasculitis, lupus vasculitis, rheumatoid vasculitis, microscopic polyangiitis (MPA), polyarteritis nodosa (PAN), polymyalgia rheumaticia, vasculitis, primary immune deficiency, and the like.

[0301] Other examples of potential autoimmune disorders and diseases, as well as autoimmune comorbidities that can be treated with the compounds described herein include, but are not limited to, chronic fatigue syndrome, complex regional pain syndrome, eosinophilic esophagitis, gastirtis, interstitial lung disease, POEMS syndrome, Raynaud's phenomenon, primary immunodeficiency, pyoderma gangrenosum, agammaglobulinemia, anyloidosis, anyotrophic lateral sclerosis, anti-tubular basement membrane nephritis, atopic allergy, atopic dermatitis, autoimmune peripheral neuropathy, Blau syndrome, Castleman's disease, Chagas disease, chronic obstructive pulmonary disease, chronic recurrent multifocal osteomyelitis, complement component 2 deficiency, contact dermatitis, Cushing's syndrome, cutaneous leukocytoclastic angiitis, Dego' disease, eczema, eosinophilic gastroenteritis, eosinophilic pneumonia, erythroblastosis fetalsis, fibrodysplasia ossificans progressive, gastrointestinal pemphigoid, hypogammaglobulinemia, idiopathic giant cell myocarditis, idiopathic pulmonary fibrosis, IgA nephropathy, immunregulatory lipoproteins, IPEX syndrome, ligenous conjunctivitis, Majeed syndrome, narcolepsy, Rasmussen's encephalitis, schizophrenia, serum sickness, spondyloathropathy, Sweet's syndrome, Takayasu's arteritis, and the like.

[0302] In some embodiments, the autoimmune disorder does not comprise pemphigus vulgaris, pemphigus. In some embodiments, the autoimmune disorder does not comprise pemphigus foliaceus. In some embodiments, the autoimmune disorder does not comprise bullous pemphigoid. In some embodiments, the autoimmune disorder does not comprise Goodpasture's disease. In some embodiments, the autoimmune disorder does not comprise psoriasis. In some embodiments, the autoimmune disorder does not comprise a skin disorder. In some embodiments, the disorder does not comprise a neoplastic disorder, e.g., cancer.

[0303] In some embodiments, the therapeutic compounds or polypeptides provided for herein can be used to reduce T cell infiltration in a specific tissue. In some embodiments, the T-cell infiltration can be reduced in the intestine. In some embodiments, the reduced T-cell infiltration reduces the CD8+ and CD4+ T cell infiltration in the tissue. In some embodiments, the infiltration is reduced by at least, or about, 10%, 20%, 30%, 40%, 50%, 60%, 70%, 80%, 90% or 95%. In some embodiments, the method comprises administering to the subject a polypeptide comprising an tissue targeted tether and an effector molecule. Examples of the tether and the effector molecules are provided for herein. In some embodiments, the tissue targeting tether is an anti-MAdCAM tether. In some embodiments, the tissue targeting tether targets the effector molecule to the intestine. In some embodiments, the intestine is the small intestine or the large intestine. In some embodiments, the intestine targeting tether is an anti-MAdCAM antibody, such as, but not limited to, those provided for herein. In some embodiments, the effector molecule is a PD-1 agonist or IL-2 mutein.

### Therapeutic Compounds

[0304] A therapeutic compound comprises a specific targeting moiety functionally associated with an effector binding/modulating moiety. In some embodiments, the specific targeting moiety and effector binding/modulating moiety are linked to one another by a covalent or noncovalent bond, e.g., a covalent or non-covalent bond directly linking the one to the other. In other embodiments, a specific targeting moiety and effector binding/modulating moiety are linked, e.g., covalently or noncovalently, through a linker moiety. E.g., in the case of a fusion polypeptide, a polypeptide sequence comprising the specific targeting moiety and a polypeptide sequence can be directly linked to one another or linked through one or more linker sequences. In some embodiments, the linker moiety comprises a polypeptide. Linkers are not, however, limited to polypeptides. In some embodiments, a linker moiety comprises other backbones, e.g., a non-peptide polymer, e.g., a PEG polymer. In some embodiments, a linker moiety can comprise a particle, e.g., a nanoparticle, e.g., a polymeric nanoparticle. In some embodiments, a linker moiety can comprise a branched molecule, or a dendrimer. However, in embodiments where the effector binding/modulating moiety comprises an ICIM binding/modulating moiety (which binds an effector like PD-1) structures that result in clustering in the absence of target binding should be avoided as they may cause clustering in the absence of target binding. Thus in embodiments, the therapeutic compound has a structure, e.g., the copies of an ICIM are sufficiently limited, such that clustering in the absence of target binding is minimized or substantially eliminated, or eliminated, or is sufficiently minimized that substantial systemic immune suppression does not occur.

[0305] In some embodiments, a therapeutic compound comprises a polypeptide comprising a specific targeting moiety covalently or non-covalently conjugated to an effector binding/modulating moiety. In some embodiments, a therapeutic molecule comprises a fusion protein having comprising a specific targeting moiety fused, e.g., directly or through a linking moiety comprising one or more amino acid residues, to an effector binding/modulating moiety. In some embodiments, a therapeutic molecule comprises a polypeptide comprising a specific targeting moiety linked by a non-covalent bond or a covalent bond, e.g., a covalent bond other than a peptide bond, e.g., a sulfhydryl bond, to an effector binding/modulating moiety.

[0306] In some embodiments, a therapeutic compound comprises polypeptide, e.g., a fusion polypeptide, comprising:

[0307] 1.a) a specific targeting moiety comprising a target specific binding polypeptide;

[0308] 1.b) a specific targeting moiety comprising a target ligand binding molecule;

[0309] 1.c) a specific targeting moiety comprising an antibody molecule;

[0310] 1.d) a specific targeting moiety comprising a single chain antibody molecule, e.g., a scFv domain; or

[0311] 1.e) a specific targeting moiety comprising a first of the light or heavy chain variable region of an antibody molecule, and wherein the other variable region is covalently or non-covalently associated with the first;

[0312] and

[0313] 2.a) an effector binding/modulating moiety comprising an effector specific binding polypeptide;

[0314] 2.b) an effector binding/modulating moiety comprising an effector ligand binding molecule;

[0315] 2.c) an effector binding/modulating moiety comprising an antibody molecule;

[0316] 2.d) an effector binding/modulating moiety comprising a single chain antibody molecule, e.g., a scFv domain; or

[0317] 2.e) an effector binding/modulating moiety comprising a first of the light or heavy chain variable region of an antibody molecule, and wherein the other variable region is covalently or non-covalently associated with the first.

[0318] In some embodiments, a therapeutic compound comprises 1.a and 2.a.

[0319] In some embodiments, a therapeutic compound comprises 1.a and 2.b.

[0320] In some embodiments, a therapeutic compound comprises 1.a and 2.c.

[0321] In some embodiments, a therapeutic compound comprises 1.a and 2.d.

[0322] In some embodiments, a therapeutic compound comprises 1.a and 2.e.

[0323] In some embodiments, a therapeutic compound comprises 1.b and 2.a.

[0324] In some embodiments, a therapeutic compound comprises 1.b and 2.b.

[0325] In some embodiments, a therapeutic compound comprises 1.b and 2.c.

[0326] In some embodiments, a therapeutic compound comprises 1.b and 2.d.

[0327] In some embodiments, a therapeutic compound comprises 1.b and 2.e.

[0328] In some embodiments, a therapeutic compound comprises 1.c and 2.a.

[0329] In some embodiments, a therapeutic compound comprises 1.c and 2.b.

[0330] In some embodiments, a therapeutic compound comprises 1.c and 2.c.

[0331] In some embodiments, a therapeutic compound comprises 1.c and 2.d.

[0332] In some embodiments, a therapeutic compound comprises 1.c and 2.e.

[0333] In some embodiments, a therapeutic compound comprises 1.d and 2.a.

[0334] In some embodiments, a therapeutic compound comprises 1.d and 2.b.

[0335] In some embodiments, a therapeutic compound comprises 1.d and 2.c.

[0336] In some embodiments, a therapeutic compound comprises 1.d and 2.d.

[0337] In some embodiments, a therapeutic compound comprises 1.d and 2.e.

[0338] In some embodiments, a therapeutic compound comprises 1.e and 2.a.

[0339] In some embodiments, a therapeutic compound comprises 1.e and 2.b.

[0340] In some embodiments, a therapeutic compound comprises 1.e and 2.c.

[0341] In some embodiments, a therapeutic compound comprises 1.e and 2.d.

[0342] In some embodiments, a therapeutic compound comprises 1.e and 2.e.

[0343] Therapeutic compounds disclosed herein can, for example, comprise a plurality of effector binding/modulating and specific targeting moieties. Any suitable linker or platform can be used to present the plurality of moieties. The linker is typically coupled or fused to one or more effector binding/modulating and targeting moieties.

[0344] In some embodiments, two (or more) linkers associate, either covalently or non-covalently, e.g., to form a hetero- or homodimeric therapeutic compound. E.g., the linker can comprise an Fc region and two Fc regions associate with one another. In some embodiments of a therapeutic compound comprising two linker regions, the linker regions can self associate, e.g., as two identical Fc regions. In some embodiments of a therapeutic compound comprising two linker regions, the linker regions are not capable of, or not capable of substantial, self association, e.g., the two Fc regions can be members of a knob and hole pair.

[0345] Non-limiting exemplary configurations of therapeutic compounds comprise the following (e.g., in N to C terminal order):

[0346] R1---Linker Region A-R2

[0347] R3---Linker Region B---R4,

wherein,

[0348] R1, R2, R3, and R4, each independently comprises an effector binding/modulating moiety, e.g., an ICIM binding/modulating moiety, an IIC binding/modulating moiety, ICSM binding/modulating moiety, or an SM binding/modulating moiety, a specific targeting moiety, or is absent;

[0349] Linker Region A and Linker Region B comprise moieties that can associate with one another, e.g., Linker A and Linker B each comprises an Fc moiety provided that an effector binding/modulating moiety and a specific targeting moiety are present.

[0350] In some embodiments:

[0351] R1 comprises an effector binding/modulating moiety, e.g., an ICIM binding/modulating moiety, an IIC binding/modulating moiety, ICSM binding/modulating moiety, or an SM binding/modulating moiety, or is absent;

[0352] R2 comprises a specific targeting moiety, or is absent;

[0353] R3 comprises an effector binding/modulating moiety, e.g., an ICIM binding/modulating moiety, an IIC binding/modulating moiety, ICSM binding/modulating moiety, or an SM binding/modulating moiety, or is absent;

[0354] R4 comprises a specific targeting moiety, or is absent;

[0355] Linker Region A and Linker Region B comprise moieties that can associate with one another, e.g., Linker A and Linker B each comprises an Fc moiety, provided that one of R1 or R3 is present and one of R2 or R4 is present.

[0356] In some embodiments:

[0357] R1 comprises a specific targeting moiety, or is absent;

[0358] R2 comprises an effector binding/modulating moiety, e.g., an ICIM binding/modulating moiety, an IIC binding/modulating moiety, ICSM binding/modulating moiety, or an SM binding/modulating moiety, or is absent;

[0359] R3 comprises a specific targeting moiety, or is absent;

[0360] R4 comprises an effector binding/modulating moiety, e.g., an ICIM binding/modulating moiety, an IIC binding/modulating moiety, ICSM binding/modulating moiety, or an SM binding/modulating moiety, or is absent;

[0361] Linker Region A and Linker Region B comprise moieties that can associate with one another, e.g., Linker A and Linker B each comprises an Fc moiety, provided that one of R1 or R3 is present and one of R2 or R4 is present.

Non-limiting examples include, but are not limited to:

| | Linker | | | Linker | | |
|---|---|---|---|---|---|---|
| R1 | Region A | R2 | R3 | Region B | R4 | Other |
| HCVR | Fc Region | fcFv | HCVR | Fc Region | scFv | Self Pairing |
| and | | | and | | | Linker Regions |
| LCVR | | | LCVR | | | |
| HCVR | Fc Region | fcFv | HCVR | Fc Region | scFv | Non-Self Pairing |
| and | | | and | | | linker regions |
| LCVR | | | LCVR | | | |
| HCVR | Fc Region | fcFv | HCVR | Fc Region | scFv | Self Pairing |
| and | | | and | | | Linker Regions |
| LCVR | | | LCVR (or | | | One of R1 or |
| (or | | | absent) | | | R3 is absent. |
| absent) | | | | | | |
| HCVR | Fc Region | fcFv | HCVR | Fc Region | scFv | Non-Self Pairing |
| and | | | and | | | Linker Regions |
| LCVR | | | LCVR (or | | | One of R1 or |
| (or | | | absent) | | | R3 is absent. |
| absent) | | | | | | |
| HCVR | Fc Region | fcFv (or | HCVR | Fc Region | scFv (or | Self Pairing |
| and | | absent) | and | | absent) | linker regions |
| LCVR | | | LCVR | | | One of R2 or |
| | | | | | | R4 is absent. |
| HCVR | Fc Region | fcFv (or | HCVR | Fc Region | scFv (or | Non-Self Pairing |
| and | | absent) | and | | absent) | linker regions |
| LCVR | | | LCVR | | | One of R2 or |
| | | | | | | R4 is absent. |
| HCVR | Fc Region | fcFv | HCVR | Fc Region | scFv | Self Pairing |
| and | | | and | | | Linker Regions |
| LCVR | | | LCVR | | | R1 and R3 are |
| | | | | | | the same |
| HCVR | Fc Region | fcFv | HCVR | Fc Region | scFv | Non-Self Pairing |
| and | | | and | | | linker regions |
| LCVR | | | LCVR | | | R1 and R3 are |
| | | | | | | different |
| HCVR | Fc Region | fcFv | HCVR | Fc Region | scFv | Self Pairing |
| and | | | and | | | Linker Regions |
| LCVR | | | LCVR | | | R2 and R4 are |
| | | | | | | the same |
| HCVR | Fc Region | fcFv | HCVR | Fc Region | scFv | Non-Self Pairing |
| and | | | and | | | linker regions |
| LCVR | | | LCVR | | | R2 and R4 are |
| | | | | | | different |

HCVR and LCVR: refers to an moiety comprising an antigen binding portion of a heavy and light chain variable region, typically with the heavy chain fused to the Linker region.
Self pairing: wherein a liker region can pair with itself, e.g., an Fc region that can pair a copy of itself.
Non-self pairing: wherein a Linker Region does not pair with itself, or does not substantially pair with itself, e.g., an Fc region does not, or does not significantly pair with itself, e.g., wherein Linker Region A and Linker Region B are members of a knob and hole pair.

In some embodiments:
R1, R2, R3 and R4 each independently comprise: an effector binding modulating moiety that activates an inhibitory receptor on an immune cell, e.g., a T cell or a B cell, e.g., a PD-L1 molecule or a functional anti-PD-1 antibody molecule (an agonist of PD-1), a specific targeting moiety, or is absent;
provided that an effector binding moiety and a specific targeting moiety are present.
In some embodiments, Linker A and Linker B comprise Fc moieties (e.g., self pairing Fc moieties).
In some embodiments:
R1 and R3 independently comprise an effector binding modulating moiety that activates an inhibitory receptor on an immune cell, e.g., a T cell or a B cell, e.g., a PD-L1 molecule or an functional anti-PD-1 antibody molecule (an agonist of PD-1); and
R2 and R4 independently comprise specific targeting moieties, e.g., scFv molecules against a tissue antigen.
In some embodiments, Linker A and Linker B comprise Fc moieties (e.g., self pairing Fc moieties).
In some embodiments:
R1 and R3 independently comprise a functional anti-PD-1 antibody molecule (an agonist of PD-1); and
R2 and R4 independently comprise specific targeting moieties, e.g., scFv molecules against a tissue antigen.
In some embodiments, Linker A and Linker B comprise Fc moieties (e.g., self pairing Fc moieties).
In some embodiments:
R1 and R3 independently comprise specific targeting moieties, e.g., an anti-tissue antigen antibody; and
R2 and R4 independently comprise a functional anti-PD-1 antibody molecule (an agonist of PD-1), e.g., an scFv molecule.
In some embodiments, Linker A and Linker B comprise Fc moieties (e.g., self pairing Fc moieties).
In some embodiments:
R1 and R3 independently comprise a PD-L1 molecule (an agonist of PD-1); and
R2 and R4 independently comprise specific targeting moieties, e.g., scFv molecules against a tissue antigen; and
in some embodiments, Linker A and Linker B comprise Fc moieties (e.g., self pairing Fc moieties).
In some embodiments:
R1 and R3 independently comprise specific targeting moieties, e.g., an anti-tissue antigen antibody; and
R2 and R4 independently comprise a PD-L1 molecule (an agonist of PD-1).
In some embodiments, Linker A and Linker B comprise Fc moieties (e.g., self pairing Fc moieties).
In some embodiments:
R1, R2, R3 and R4 each independently comprise: an SM binding/modulating moiety which modulates, e.g., binds and inhibits, sequesters, degrades or otherwise neutralizes a substance, e.g., a soluble molecule that modulates an immune response, e.g., ATP or AMP, e.g., a CD39 molecule or a CD73 molecule; a specific targeting moiety, or is absent;
provided that an SM binding/modulating moiety and a specific targeting moiety are present.
In some embodiments, Linker A and Linker B comprise Fc moieties (e.g., self pairing Fc moieties or Fc moieties that do not, or do not substantially self pair).
In some embodiments:
R1 and R3 independently comprise an SM binding/modulating moiety which modulates, e.g., binds and inhibits, sequesters, degrades or otherwise neutralizes a substance, e.g., a soluble molecule that modulates an immune response, e.g., ATP or AMP, e.g., a CD39 molecule or a CD73 molecule; and
R2 and R4 independently comprise specific targeting moieties, e.g., scFv molecules against a tissue antigen.
In some embodiments, Linker A and Linker B comprise Fc moieties (e.g., self pairing Fc moieties or Fc moieties that do not, or do not substantially self pair).
In some embodiments:
R1 and R3 independently comprise a CD39 molecule or a CD73 molecule; and
R2 and R4 independently comprise specific targeting moieties, e.g., scFv molecules against a tissue antigen.
In some embodiments, Linker A and Linker B comprise Fc moieties (e.g., self pairing Fc moieties or Fc moieties that do not, or do not substantially self pair).
In some embodiments:
R1 and R3 each comprises a CD39 molecule; and
R2 and R4 independently comprise specific targeting moieties, e.g., scFv molecules against a tissue antigen; and
in some embodiments, Linker A and Linker B comprise Fc moieties (e.g., self pairing Fc moieties or Fc moieties that do not, or do not substantially self pair).
In some embodiments:
R1 and R3 each comprises a CD73 molecule; and
R2 and R4 independently comprise specific targeting moieties, e.g., scFv molecules against a tissue antigen.
In some embodiments, Linker A and Linker B comprise Fc moieties (e.g., self pairing Fc moieties or Fc moieties that do not, or do not substantially self pair).
In some embodiments:
One of R1 and R3 comprises a CD39 molecule and the other comprises a CD73 molecule; and
R2 and R4 independently comprise specific targeting moieties, e.g., scFv molecules against a tissue antigen.
In some embodiments, Linker A and Linker B comprise Fc moieties (e.g., self pairing Fc moieties or Fc moieties that do not, or do not substantially self pair).
In some embodiments:
R1, R2, R3 and R4 each independently comprise: an HLA-G molecule; a specific targeting moiety, or is absent;
provided that an HLA-G molecule and a specific targeting moiety are present.
In some embodiments, Linker A and Linker B comprise Fc moieties (e.g., self pairing Fc moieties or Fc moieties that do not, or do not substantially self pair).
In some embodiments:
R1 and R3 each comprise an HLG-A molecule; and
R2 and R4 independently comprise specific targeting moieties, e.g., scFv molecules against a tissue antigen.
In some embodiments, Linker A and Linker B comprise Fc moieties (e.g., self pairing Fc moieties or Fc moieties that do not, or do not substantially self pair).
In some embodiments:
R1 and R3 each comprise an agonistic anti-LILRB1 antibody molecule; and
R2 and R4 independently comprise specific targeting moieties, e.g., scFv molecules against a tissue antigen.
In some embodiments, Linker A and Linker B comprise Fc moieties (e.g., self pairing Fc moieties or Fc moieties that do not, or do not substantially self pair).
In some embodiments:
R1 and R3 each comprise an agonistic anti-KIR2DL4 antibody molecule; and
R2 and R4 independently comprise specific targeting moieties, e.g., scFv molecules against a tissue antigen.
In some embodiments, Linker A and Linker B comprise Fc moieties (e.g., self pairing Fc moieties or Fc moieties that do not, or do not substantially self pair).
In some embodiments:
R1 and R3 each comprise an agonistic anti-LILRB2 antibody molecule; and
R2 and R4 independently comprise specific targeting moieties, e.g., scFv molecules against a tissue antigen.
In some embodiments, Linker A and Linker B comprise Fc moieties (e.g., self pairing Fc moieties or Fc moieties that do not, or do not substantially self pair).
In some embodiments:
R1 and R3 each comprise an agonistic anti-NKG2A antibody molecule; and
R2 and R4 independently comprise specific targeting moieties, e.g., scFv molecules against a tissue antigen.
In some embodiments, Linker A and Linker B comprise Fc moieties (e.g., self pairing Fc moieties or Fc moieties that do not, or do not substantially self pair).
In some embodiments:
one of R1 and R3 comprises a first moiety chosen from, and the other comprises a different moiety chosen from: an antagonistic anti-LILRB1 antibody molecule, an agonistic anti-KR2DL4 antibody molecule, and an agonistic anti-NKG2A antibody molecule; and
R2 and R4 independently comprise specific targeting moieties, e.g., scFv molecules against a tissue antigen.
In some embodiments, Linker A and Linker B comprise Fc moieties (e.g., self pairing Fc moieties or Fc moieties that do not, or do not substantially self pair).
In some embodiments:
one of R1 and R3 comprises an antagonistic anti-LILRB1 antibody molecule and the other comprises an agonistic anti-KR2DL4 antibody molecule; and
R2 and R4 independently comprise specific targeting moieties, e.g., scFv molecules against a tissue antigen.
In some embodiments, Linker A and Linker B comprise Fc moieties (e.g., self pairing Fc moieties or Fc moieties that do not, or do not substantially self pair).
In some embodiments:
one of R1 and R3 comprises an antagonistic anti-LILRB1 antibody molecule and the other comprises an agonistic anti-NKG2A antibody molecule; and
R2 and R4 independently comprise specific targeting moieties, e.g., scFv molecules against a tissue antigen.
In some embodiments, Linker A and Linker B comprise Fc moieties (e.g., self pairing Fc moieties or Fc moieties that do not, or do not substantially self pair).

[0362] In an embodiment:

[0363] R1, R2, R3 and R4 each independently comprise: an IL-2 mutein molecule; a specific targeting moiety, or is absent;

[0364] provided that an IL-2 mutein molecule and a specific targeting moiety are present.

[0365] In an embodiment, Linker A and Linker B comprise Fc moieties (e.g., self pairing Fc moieties or Fc moieties that do not, or do not substantially self pair).

[0366] One of R1, R2, R3 and R4 comprises an IL-2 mutein molecule, one comprises an anti-GITR antibody molecule, e.g., an anti-GITR antibody molecule that inhibits binding of GITRL to GITR, and one comprises a specific targeting moiety;

[0367] In an embodiment, Linker A and Linker B comprise Fc moieties (e.g., self pairing Fc moieties or Fc moieties that do not, or do not substantially self pair).

[0368] In an embodiment:

[0369] R1 and R3 each comprise an IL-2 mutein molecule; and

[0370] R2 and R4 independently comprise specific targeting moieties, e.g., scFv molecules against a tissue antigen.

[0371] In an embodiment Linker A and Linker B comprise Fc moieties (e.g., self pairing Fc moieties or Fc moieties that do not, or do not substantially self pair).

[0372] In an embodiment:

[0373] one of R1 and R3 comprises a GARP binding molecule, e.g., an anti-GARP antibody molecule or a GITR binding molecule, e.g., an anti-GITR antibody molecule and the other comprises an IL-2 mutein molecule; and

[0374] R2 and R4 independently comprise specific targeting moieties, e.g., scFv molecules against a tissue antigen.

[0375] In an embodiment, Linker A and Linker B comprise Fc moieties (e.g., self pairing Fc moieties or Fc moieties that do not, or do not substantially self pair).

[0376] In an embodiment:

[0377] one of R1 and R3 comprises a GARP binding molecule, e.g., an anti-GARP antibody molecule and the other comprises an IL-2 mutein molecule; and

[0378] R2 and R4 independently comprise specific targeting moieties, e.g., scFv molecules against a tissue antigen.

[0379] In an embodiment, Linker A and Linker B comprise Fc moieties (e.g., self pairing Fc moieties or Fc moieties that do not, or do not substantially self pair).

[0380] In an embodiment:

[0381] one of R1 and R3 comprises a GITR binding molecule, e.g., an anti-GITR antibody molecule, and the other comprises an IL-2 mutein molecule; and

[0382] R2 and R4 independently comprise specific targeting moieties, e.g., scFv molecules against a tissue antigen.

[0383] In an embodiment, Linker A and Linker B comprise Fc moieties (e.g., self pairing Fc moieties or Fc moieties that do not, or do not substantially self pair).

[0384] In some embodiments:

R1, R2, R3 and R4 each independently comprise: an effector binding modulating moiety that activates an inhibitory receptor on a B cell, e.g., an anti-FCRL antibody molecule, e.g., an agonistic anti-FCRL antibody molecule; a specific targeting moiety, or is absent; provided that an effector binding moiety and a specific targeting moiety are present. In some embodiments, Linker A and Linker B comprise Fc moieties (e.g., self pairing Fc moieties or Fc moieties that do not, or do not substantially self pair).

[0385] In an embodiment, the anti-FCRL molecule comprises: an anti-FCRL antibody molecule, e.g., an agonistic anti-FCRL antibody molecule, directed to FCRL1, FCRL2, FCRL3, FCRL4, FCRL5, or FCRL6.

In some embodiments:
R1 and R3 each comprises an agonistic anti-FCRL antibody molecule; and
R2 and R4 independently comprise specific targeting moieties, e.g., scFv molecules against a tissue antigen.
In some embodiments, Linker A and Linker B comprise Fc moieties (e.g., self pairing Fc moieties or Fc moieties that do not, or do not substantially self pair).

[0386] In an embodiment, the anti-FCRL molecule comprises: an anti-FCRL antibody molecule, e.g., an agonistic anti-FCRL antibody molecule directed to FCRL1, FCRL2, FCRL3, FCRL4, FCRL5, or FCRL6.

In some embodiments:
R1 and R3 independently comprise specific targeting moieties, e.g., antibody molecules against a tissue antigen; and
R2 and R4 each comprises an anti-FCRL antibody molecule, e.g., an agonistic anti-FCRL antibody molecule, e.g., an scFv molecule.
In some embodiments, Linker A and Linker B comprise Fc moieties (e.g., self pairing Fc moieties or Fc moieties that do not, or do not substantially self pair).

[0387] In an embodiment, the anti-FCRL molecule comprises: an anti-FCRL antibody molecule, e.g., an agonistic anti-FCRL antibody molecule directed to FCRL1, FCRL2, FCRL3, FCRL4, FCRL5, or FCRL6.

In some embodiments:
One of R1, R2, R3 and R4 comprises an anti-BCR antibody molecule, e.g., an antagonistic anti-BCR antibody molecule, one comprises an anti FCRL antibody molecule, and one comprises a specific targeting moiety.
In some embodiments, Linker A and Linker B comprise Fc moieties (e.g., self pairing Fc moieties or Fc moieties that do not, or do not substantially self pair).

[0388] In some embodiments, the anti-FCRL molecule comprises an anti-FCRL antibody molecule, e.g., an agonistic anti-FCRL antibody molecule directed to FCRL1, FCRL2, FCRL3, FCRL4, FCRL5, or FCRL6.

In some embodiments:
One of R1, R2, R3 and R4 comprises a bispecfic antibody molecule comprising an anti-BCR antibody molecule, e.g., an antagonistic anti-BCR antibody molecule, and an anti FCRL antibody molecule, and one comprises a specific targeting moiety.
In some embodiments, Linker A and Linker B comprise Fc moieties (e.g., self pairing Fc moieties or Fc moieties that do not, or do not substantially self pair).

[0389] In an embodiment, the anti-FCRL molecule comprises an anti-FCRL antibody molecule, e.g., an agonistic anti-FCRL antibody molecule directed to FCRL1, FCRL2, FCRL3, FCRL4, FCRL5, or FCRL6.

In some embodiments:
R1, R2, R3 and R4 each independently comprise:
i) an effector binding/modulating moiety, e.g., an ICIM binding/modulating moiety, an IIC binding/modulating moiety, ICSM binding/modulating moiety, or an SM binding/modulating moiety, that minimizes or inhibits T cell activity, expansion, or function (a T cell effector binding/modulating moiety);
ii) an effector binding/modulating moiety, e.g., an ICIM binding/modulating moiety, an IIC binding/modulating moiety, ICSM binding/modulating moiety, or an SM binding/modulating moiety, that minimizes or inhibits B cell activity, expansion, or function (a B cell effector binding/modulating moiety);
iii) a specific targeting moiety; or
iv) is absent;
provided that, a T cell effector binding/modulating moiety, a B cell effector binding/modulating moiety, and a specific targeting moiety are present.
In some embodiments, Linker A and Linker B comprise Fc moieties (e.g., self pairing Fc moieties).
In some embodiments, one of R1, R2, R3, and R4 comprises an agonistic anti-PD-1 antibody and one comprises an HLA-G molecule.

[0390] In some embodiments, one of R1, R2, R3, and R4 comprises an SM binding/modulating moiety, e.g., a CD39 molecule or a CD73 molecule. In some embodiments, one of R1, R2, R3, and R4 comprises an entity that binds, activates, or maintains, a regulatory immune cell, e.g., a Treg cell or a Breg cell, for example, an IL-2 mutein molecule.

[0391] In some embodiments, one of R1, R2, R3, and R4 comprises an agonistic anti-PD-1 antibody, or one comprises an HLA-G molecule, and one comprises an IL-2 mutein molecule. In some embodiments, the PD-1 antibody is replaced with a IL-2 mutein molecule. In some embodiments, one of R1, R2, R3, and R4 comprises an agonistic anti-PD-1 antibody, one comprises an HLA-G molecule, and one comprises CD39 molecule, or a CD73 molecule. In some embodiments, the PD-1 antibody is replaced with a IL-2 mutein molecule.

[0392] Linker Regions

[0393] As discussed elsewhere herein specific targeting and effector binding/modulating moieties can be linked by linker regions. Any linker region described herein can be used as a linker. For example, Linker Regions A and B can comprise Fc regions. In some embodiments, a therapeutic compound comprises a Linker Region that can self-associate. In some embodiments, a therapeutic compound comprises a Linker Region that has a moiety that minimizes self association, and typically Linker Region A and Linker Region B are heterodimers. Linkers also include glycine/serine linkers. In some embodiments, the linker can comprise one or more repeats of GGGGS (SEQ ID NO: 23). In some embodiments, the linker comprises 1, 2, 3, 4, or 5 repeats of SEQ ID NO: 23. In some embodiments, the linker comprises of GGGGSGGGGSGGGGSGGGGS (SEQ ID NO: 22), GGGGSGGGGSGGGGS (SEQ ID NO: 30), or GGGGSGGGGS (SEQ ID NO: 802). These linkers can be used in any of the therapeutic compounds or compositions provided herein.

[0394] The linker region can comprise a Fc region that has been modified (e.g., mutated) to produce a heterodimer. In some embodiments, the CH3 domain of the Fc region can be mutated. Examples of such Fc regions can be found in, for example, U.S. Pat. No. 9,574,010, which is hereby incorporated by reference in its entirety. The Fc region as defined herein comprises a CH3 domain or fragment thereof, and may additionally comprise one or more addition constant region domains, or fragments thereof, including hinge, CH1, or CH2. It will be understood that the numbering of the Fc amino acid residues is that of the EU index as in Kabat et al 1991, NIH Publication 91-3242, National Technical Information Service, Springfield, Va. The “EU index as set forth in Kabat” refers to the EU index numbering of the human IgG1 Kabat antibody. For convenience, Table B of U.S. Pat. No. 9,574,010 provides the amino acids numbered according to the EU index as set forth in Kabat of the CH2 and CH3 domain from human IgG1, which is hereby incorporated by reference. Table 1.1 of U.S. Pat. No. 9,574,010 provides mutations of variant Fc heterodimers that can be used as linker regions. Table 1.1 of U.S. Pat. No. 9,574,010 is hereby incorporated by reference.

[0395] In some embodiments, the Linker Region A comprises a first CH3 domain polypeptide and a the Linker Region B comprises a second CH3 domain polypeptide, the first and second CH3 domain polypeptides independently comprising amino acid modifications as compared to a wild-type CH3 domain polypeptide, wherein the first CH3 domain polypeptide comprises amino acid modifications at positions T350, L351, F405, and Y407, and the second CH3 domain polypeptide comprises amino acid modifications at positions T350, T366, K392 and T394, wherein the amino acid modification at position T350 is T350V, T3501, T350L or T350M; the amino acid modification at position L351 is L351Y; the amino acid modification at position F405 is F405A, F405V, F405T or F405S; the amino acid modification at position Y407 is Y407V, Y407A or Y407I; the amino acid modification at position T366 is T366L, T366I, T366V, or T366M; the amino acid modification at position K392 is K392F, K392L or K392M; and the amino acid modification at position T394 is T394W, and wherein the numbering of amino acid residues is according to the EU index as set forth in Kabat.

[0396] In some embodiments, the amino acid modification at position K392 is K392M or K392L. In some embodiments, the amino acid modification at position T350 is T350V. In some embodiments, the first CH3 domain polypeptide further comprises one or more amino acid modifications selected from Q347R and one of S400R or S400E. In some embodiments, the second CH3 domain polypeptide further comprises one or more amino acid modifications selected from L351Y, K360E, and one of N390R, N390D or N390E. In some embodiments, the first CH3 domain polypeptide further comprises one or more amino acid modifications selected from Q347R and one of S400R or S400E, and the second CH3 domain polypeptide further comprises one or more amino acid modifications selected from L351Y, K360E, and one of N390R, N390D or N390E. In some embodiments, the amino acid modification at position T350 is T350V. In some embodiments, the amino acid modification at position F405 is F405A. In some embodiments, the amino acid modification at position Y407 is Y407V. In some embodiments, the amino acid modification at position T366 is T366L or T366I. In some embodiments, the amino acid modification at position F405 is F405A, the amino acid modification at position Y407 is and Y407V, the amino acid modification at position T366 is T366L or T366I, and the amino acid modification at position K392 is K392M or K392L. In some embodiments, the first CH3 domain polypeptide comprises the amino acid modifications T350V, L351Y, S400E, F405V and Y407V, and the second CH3 domain polypeptide comprises the amino acid modifications T350V, T366L, N390R, K392M and T394W. In some embodiments, the first CH3 domain polypeptide comprises the amino acid modifications T350V, L351Y, S400E, F405T and Y407V, and the second CH3 domain polypeptide comprises the amino acid modifications T350V, T366L, N390R, K392M and T394W. In some embodiments, the first CH3 domain polypeptide comprises the amino acid modifications T350V, L351Y, S400E, F405S and Y407V, and the second CH3 domain polypeptide comprises the amino acid modifications T350V, T366L, N390R, K392M and T394W. In some embodiments, the first CH3 domain polypeptide comprises the amino acid modifications T350V, L351Y, S400E, F405A and Y407V, and the second CH3 domain polypeptide comprises the amino acid modifications T350V, L351Y, T366L, N390R, K392M and T394W. In some embodiments, the first CH3 domain polypeptide comprises the amino acid modifications Q347R, T350V, L351Y, S400E, F405A and Y407V, and the second CH3 domain polypeptide comprises the amino acid modifications T350V, K360E, T366L, N390R, K392M and T394W. In some embodiments, the first CH3 domain polypeptide comprises the amino acid modifications T350V, L351Y, S400R, F405A and Y407V, and the second CH3 domain polypeptide comprises the amino acid modifications T350V, T366L, N390D, K392M and T394W. In some embodiments, the first CH3 domain polypeptide comprises the amino acid modifications T350V, L351Y, S400R, F405A and Y407V, and the second CH3 domain polypeptide comprises the amino acid modifications T350V, T366L, N390E, K392M and T394W. In some embodiments, the first CH3 domain polypeptide comprises the amino acid modifications T350V, L351Y, S400E, F405A and Y407V, and the second CH3 domain polypeptide comprises the amino acid modifications T350V, T366L, N390R, K392L and T394W. In some embodiments, the first CH3 domain polypeptide comprises the amino acid modifications T350V, L351Y, S400E, F405A and Y407V, and the second CH3 domain polypeptide comprises the amino acid modifications T350V, T366L, N390R, K392F and T394W.

[0397] In some embodiments, an isolated heteromultimer comprising a heterodimeric CH3 domain comprising a first CH3 domain polypeptide and a second CH3 domain polypeptide, the first CH3 domain polypeptide comprising amino acid modifications at positions F405 and Y407, and the second CH3 domain polypeptide comprising amino acid modifications at positions T366 and T394, wherein: (i) the first CH3 domain polypeptide further comprises an amino acid modification at position L351, and (ii) the second CH3 domain polypeptide further comprises an amino acid modification at position K392, wherein the amino acid modification at position F405 is F405A, F405T, F405S or F405V; and the amino acid modification at position Y407 is Y407V, Y407A, Y407L or Y407I; the amino acid modification at position T394 is T394W; the amino acid modification at position L351 is L351Y; the amino acid modification at position K392 is K392L, K392M, K392V or K392F, and the amino acid modification at position T366 is T366I, T366L, T366M or T366V, wherein the heterodimeric CH3 domain has a melting temperature (Tm) of about 70° C. or greater and a purity greater than about 90%, and wherein the numbering of amino acid residues is according to the EU index as set forth in Kabat.

[0398] In some embodiments, the Linker Region A comprises a first CH3 domain polypeptide and a t Linker Region B comprises a second CH3 domain polypeptide, wherein the first CH3 domain polypeptide comprising amino acid modifications at positions F405 and Y407, and the second CH3 domain polypeptide comprising amino acid modifications at positions T366 and T394, wherein: (i) the first CH3 domain polypeptide further comprises an amino acid modification at position L351, and (ii) the second CH3 domain polypeptide further comprises an amino acid modification at position K392, wherein the amino acid modification at position F405 is F405A, F405T, F405S or F405V; and the amino acid modification at position Y407 is Y407V, Y407A, Y407L or Y407I; the amino acid modification at position T394 is T394W; the amino acid modification at position L351 is L351Y; the amino acid modification at position K392 is K392L, K392M, K392V or K392F, and the amino acid modification at position T366 is T366I, T366L, T366M or T366V, wherein the heterodimeric CH3 domain has a melting temperature (Tm) of about 70° C. or greater and a purity greater than about 90%, and wherein the numbering of amino acid residues is according to the EU index as set forth in Kabat. In some embodiments, the amino acid modification at position F405 is F405A. In some embodiments, the amino acid modification at position T366 is T366I or T366L. In some embodiments, the amino acid modification at position Y407 is Y407V. In some embodiments, the amino acid modification at position F405 is F405A, the amino acid modification at position Y407 is Y407V, the amino acid modification at position T366 is T366I or T366L, and the amino acid modification at position K392 is K392L or K392M. In some embodiments, the amino acid modification at position F405 is F405A, the amino acid modification at position Y407 is Y407V, the amino acid modification at position T366 is T366L, and the amino acid modification at position K392 is K392M. In some embodiments, the amino acid modification at position F405 is F405A, the amino acid modification at position Y407 is Y407V, the amino acid modification at position T366 is T366L, and the amino acid modification at position K392 is K392L. In some embodiments, the amino acid modification at position F405 is F405A, the amino acid modification at position Y407 is Y407V, the amino acid modification at position T366 is T366I, and the amino acid modification at position K392 is K392M. In some embodiments, the amino acid modification at position F405 is F405A, the amino acid modification at position Y407 is Y407V, the amino acid modification at position T366 is T366I, and the amino acid modification at position K392 is K392L. In some embodiments, the first CH3 domain polypeptide further comprises an amino acid modification at position 5400 selected from S400D and S400E, and the second CH3 domain polypeptide further comprises the amino acid modification N390R. In some embodiments, the amino acid modification at position F405 is F405A, the amino acid modification at position Y407 is Y405V, the amino acid modification at position 5400 is S400E, the amino acid modification at position T366 is T366L, and the amino acid modification at position K392 is K392M.

[0399] In some embodiments, the modified first and second CH3 domains are comprised by an Fc construct based on a type G immunoglobulin (IgG). The IgG can be an IgG1, IgG2, IgG3, or IgG4.

[0400] Other Linker Region A and Linger Region B comprising variant CH3 domains are described in U.S. Pat. Nos. 9,499,634 and 9,562,109, each of which is incorporated by reference in its entirety.

[0401] A Linker Region A and Linker Region B can be complementary fragments of a protein, e.g., a naturally occurring protein such as human serum albumin. In embodiments, one of Linker Region A and Linker Region B comprises a first, e.g., an N-terminal fragment of the protein, e.g., hSA, and the other comprises a second, e.g., a C-terminal fragment of the protein, e.g., has. In an embodiment the fragments comprise an N-terminal and a C-terminal fragment. In an embodiment the fragments comprise two internal fragments. Typically the fragments do not overlap. In an embodiment the first and second fragment, together, provide the entire sequence of the original protein, e.g., hSA. The first fragment provides a N-terminus and a C-terminus for linking, e.g., fusing, to other sequences, e.g., sequences of R1, R2, R3, or R4 (as defined herein).

[0402] The Linker Region A and the Linker Region B can be derived from albumin polypeptide. In some embodiments, the albumin polypeptide is selected from native human serum albumin polypeptide and human alloalbumin polypeptide. The albumin polypeptide can be modified such that the Linker Region A and Linker Region B interact with one another to form heterodimers. Examples of modified albumin polypeptides are described in U.S. Pat. Nos. 9,388,231 and 9,499,605, each of which is hereby incorporated by reference in its entirety. Accordingly, provided herein are multifunctional heteromultimer proteins of the formula R1---Linker Region A-R2 and R3---Linker Region B---R4, wherein the Linker Region A and Linker Region B form a heteromultimer. In some embodiments, the Linker Region A comprises a first polypeptide and the Linker Region B comprises a second polypeptide; wherein each of said first and second polypeptides comprises an amino acid sequence comprising a segment of an albumin polypeptide selected from native human serum albumin polypeptide and human alloalbumin polypeptide; wherein said first and second polypeptides are obtained by segmentation of said albumin polypeptide at a segmentation site, such that the segmentation results in a deletion of zero to 3 amino acid residues at the segmentation site; wherein said first polypeptide comprises at least one mutation selected from A194C, L198C, W214C, A217C, L331C and A335C, and said second polypeptide comprises at least one mutation selected from L331C, A335C, V343C, L346C, A350C, V455C, and N458C; and wherein said first and second polypeptides self-assemble to form a quasi-native structure of the monomeric form of the albumin polypeptide.

[0403] In some embodiments, the segmentation site resides on a loop of the albumin polypeptide that has a high solvent accessible surface area (SASA) and limited contact with the rest of the albumin structure. In some embodiments, the segmentation results in a complementary interface between the transporter polypeptides. These segmentation sites are described, for example, in U.S. Pat. No. 9,388,231, which is hereby incorporated by reference in its entirety.

[0404] In some embodiments, the first polypeptide comprises residues 1-337 or residues 1-293 of the albumin polypeptide with one or more of the mutations described herein. In some embodiments, the second polypeptide comprises residues of 342-585 or 304-585 of the albumin polypeptide with one or more of the mutations described herein. In some embodiments, the first polypeptide comprises residues 1-339, 1-300, 1-364, 1-441, 1-83, 1-171, 1-281, 1-293, 1-114, 1-337, or 1-336 of the albumin protein. In some embodiments, the second polypeptide comprises residues 301-585, 365-585, 442-585, 85-585, 172-585, 282-585, or 115-585, 304-585, 340-585, or 342-585 of the albumin protein.

[0405] In some embodiments, the first and second polypeptide comprise the residues of the albumin protein as shown in the table below. The sequence of the albumin protein is described below.

| First Polypeptide Residues | Second Polypeptide Residues |
|---|---|
| 1-300 | 301-585 |
| 1-364 | 365-585 |
| 1-441 | 442-585 |
| 1-83 | 85-585 |
| 1-171 | 172-585 |
| 1-281 | 282-585 |
| 1-114 | 115-585 |
| 1-339 | 340-585 |
| 1-337 | 342-585 |
| 1-293 | 304-585 |
| 1-336 | 342-585 |

[0406] In some embodiments, the first and second polypeptides comprise a linker that can form a covalent bond with one another, such as a disulfide bond. A non-limiting example of the linker is a peptide linker. In some embodiments, the peptide linker comprises GGGGS (SEQ ID NO: 23). The linker can be fused to the C-terminus of the first polypeptide and the N-terminus of the second polypeptide. The linker can also be used to attach the moieties described herein without abrogating the ability of the linkers to form a disulfide bond. In some embodiments, the first and second polypeptides do not comprise a linker that can form a covalent bond. In some embodiments, the first and second polypeptides have the following substitutions.

| First Polypeptide Substitution | Second Polypeptide Substitution |
|---|---|
| A217C | V343C |
| L331C | A350C |
| A217C | L346C |
| W214C | V343C |
| A335C | L346C |
| L198C | V455C |
| A217C | A335C |
| A217C | L331C |
| L198C | N458C |
| A194C | V455C |

[0407] The sequence of the albumin polypeptide can be the sequence of human albumin as shown, in the post-protein form with the N-terminal signaling residues removed (MKWVTFISLLFLFSSAYSRGVFRR; SEQ ID NO: 66)

(human albumin; SEQ ID NO: 67)
[sequence omitted]

[0408] In some embodiments, the Linker Region A and the Linker Region B form a heterodimer as described herein.

[0409] In some embodiments, the polypeptide comprises at the N-terminus an antibody comprised of F(ab′)2 on an IgG1 Fc backbone fused with scFvs on the C-terminus of the IgG Fc backbone. In some embodiments, the IgG Fc backbone is a IgG1 Fc backbone. In some embodiments, the IgG1 backbone is replaced with a IgG4 backbone, IgG2 backbone, or other similar IgG backbone. The IgG backbones described in this paragraph can be used throughout this application where a Fc region is referred to as part of the therapeutic compound. Thus, in some embodiments, the antibody comprised of F(ab′)2 on an IgG1 Fc backbone can be an anti-an anti-desmoglein 1 antibody, an anti-desmoglein 2 antibody, an anti-desmoglein 3 antibody, or an anti-desmoglein 4 antibody or an anti-PD-1 antibody on an IgG1 Fc or any other targeting moiety or effector binding/modulating moiety provided herein. In some embodiments, the The scFV segments fused to the C-terminus could be an anti-PD-1 antibody, if the N-terminus region is an an anti-desmoglein 1 antibody, an anti-desmoglein 2 antibody, an anti-desmoglein 3 antibody, or an anti-desmoglein 4 antibody, if the N-terminus region is an anti-PD-1 antibody. In this non-limiting example, the N-terminus can be the targeting moiety, such as any one of the ones provided for herein, and the C-terminus can be the effector binding/modulating moiety, such as any of the ones provided for herein. Alternatively, in some embodiments, the N-terminus can be the effector binding/modulating moiety, such as any one of the ones provided for herein, and the C-terminus can be the targeting moiety, such as any of the ones provided for herein.

[0410] In some embodiments, the N-terminus can be the targeting moiety, such as any one of the ones provided for herein, and the C-terminus can be the effector binding/modulating moiety, such as any of the ones provided for herein.

[0411] In some embodiments, the therapeutic compound comprises two polypeptides that homodimerize. In some embodiments, the N-terminus of the polypeptide comprises an effector binding/modulating moiety that is fused to a human IgG1 Fc domain (e.g., CH2 and/or CH3 domains). In some embodiments, the C-terminus of the Fc domain is another linker that is fused to the targeting moiety. Thus, in some embodiments, the molecule could be represented using the formula of R1-Linker A-Fc Region-Linker B-R2, wherein R1 can be an effector binding/modulating moiety, R2 is a targeting moiety, Linker A and Linker B are independently linkers as provided for herein. In some embodiments, Linker 1 and Linker 2 are different.

[0412] In some embodiments, the molecule could be represented using the formula of R1-Linker A-Fc Region-Linker B-R2, wherein R1 can be a targeting moiety, R2 is an effector binding/modulating moiety, Linker A and Linker B are independently linkers as provided for herein. In some embodiments, Linker A and Linker B are different. The linkers can be chosen from the non-limiting examples provided for herein. In some embodiments, R1 and R2 are independently selected from F(ab′)2 and scFV antibody domains. In some embodiments, R1 and R2 are different antibody domains. In some embodiments, the scFV is in the VL-VH domain orientation.

[0413] In some embodiments, the therapeutic compound is a bispecific antibody. In some embodiments, the bispecific antibodies are comprised of four polypeptide chains comprising the following:

[0414] Chain 1: nt-VH1-CH1-CH2-CH3-Linker A-scFv[VL2-Linker B-VH2]-ct

[0415] Chain 2: nt-VH1-CH1-CH2-CH3-Linker A-scFv[VL2-Linker B-VH2]-ct

[0416] Chain 3: nt-VL1-CL-ct

[0417] Chain 4: nt-VL1-CL-ct,

[0418] wherein chains 1 and 2 are identical to each other, and chains 3 and 4 are identical to each other,

[0419] wherein chain 1 forms a homodimer with chain 2; and chain 3 and 4 associate with chain 1 and chain 2. That is, when each light chain associates with each heavy chain, VL1 associates with VH1 and CL associates with CH1 to form two functional Fab units. Without being bound to any particular theory, each scFv unit is intrinsically functional since VL2 and VH2 are covalently linked in tandem with a linker as provided herein (e.g., GGGGSG (SEQ ID NO: 23), GGGGSGGGGSGGGGSGGGGS (SEQ ID NO: 22), or GGGGSGGGGSGGGGS (SEQ ID NO: 30). The sequences of Linker A and Linker B, which are independent of one another can be the same or different and as otherwise described throughout the present application. Thus, in some embodiments, Linker A comprises GGGGS (SEQ ID NO: 23), or two repeats thereof, GGGGSGGGGSGGGGS (SEQ ID NO: 30), or GGGGSGGGGSGGGGSGGGGS (SEQ ID NO: 22). In some embodiments, Linker B comprises GGGGS (SEQ ID NO: 23), or two repets thereof, GGGGSGGGGSGGGGS (SEQ ID NO: 30), or GGGGSGGGGSGGGGSGGGGS (SEQ ID NO: 22). The scFv may be arranged in the NT-VH2-VL2-CT or NT-VL2-VH2-CT orientation. NT or nt stands for N-terminus and CT or ct stands for C-terminus of the protein. CH1, CH2, and CH3 are the domains from the IgG Fc region, and CL stands for Constant Light chain, which can be either kappa or lambda family light chains. The other definitions stand for the way they are normally used in the art.

[0420] In some embodiments, the VH1 and VL1 domains are derived from the effector molecule and the VH2 and VL2 domains are derived from the targeting moiety. In some embodiments the VH1 and VL1 domains are derived from a targeting moiety and the VH2 and VL2 domains are derived from an effector binding/modulating moiety.

[0421] In some embodiments, the VH1 and VL1 domains are derived from an anti-PD-1 antibody, and the VH2 and VL2 domains are derived from an anti-desmoglein 1 antibody, an anti-desmoglein 2 antibody, an anti-desmoglein 3 antibody, or an anti-desmoglein 4 antibody. In some embodiments the VH1 and VL1 domains are derived from an anti-desmoglein 1 antibody, an anti-desmoglein 2 antibody, an anti-desmoglein 3 antibody, or an anti-desmoglein 4 antibody and the VH2 and VL2 domains are derived from an anti-PD-1 antibody.

[0422] In some embodiments, Linker A comprises 1, 2, 3, 4, or 5 GGGGS (SEQ ID NO: 23) repeats. In some embodiments, Linker B comprises 1, 2, 3, 4, or 5 GGGGS (SEQ ID NO: 23) repeats. For the avoidance of doubt, the sequences of Linker A and Linker B, which are used throughout this application, are independent of one another. Therefore, in some embodiments, Linker A and Linker B can be the same or different. In some embodiments, Linker A comprises GGGGS (SEQ ID NO: 23), or two repeats thereof, GGGGSGGGGSGGGGS (SEQ ID NO: 30), or GGGGSGGGGSGGGGSGGGGS (SEQ ID NO: 22). In some embodiments, Linker B comprises GGGGS (SEQ ID NO: 23), or two repeats thereof, GGGGSGGGGSGGGGS (SEQ ID NO: 30), or GGGGSGGGGSGGGGSGGGGS (SEQ ID NO: 22).

[0423] In some embodiments, the therapeutic compound comprises a light chain and a heavy chain. In some embodiments, the light and heavy chain begin at the N-terminus with the VH domain of a targeting moiety followed by the CH1 domain of a human IgG1, which is fused to a Fc region (e.g., CH2-CH3) of human IgG1. In some embodiments, at the C-terminus of the Fc region is fused to a linker as provided herein, such as but not limited to, GGGGS (SEQ ID NO: 23), or two or three repeats thereof, or GGGGSGGGGSGGGGS (SEQ ID NO: 22). The linker can then be fused to an effector binding/modulating moiety, such as any one of the effector moieties provided for herein. The polypeptides can homodimerize because through the heavy chain homodimerization, which results in a therapeutic compound having two effector moieties, such as two anti-PD-1 antibodies. In this orientation, the targeting moiety is an IgG format, there are two Fab arms that each recognize binding partner of the targeting moiety, for example, desmoglein 1, 2, 3, or 4 being bound by the desmoglein 1, 2, 3, or 4 targeting moiety.

[0424] In some embodiments, the targeting moiety is an anti-desmoglein 1 antibody, an anti-desmoglein 2 antibody, an anti-desmoglein 3 antibody, or an anti-desmoglein 4 antibody.

[0425] In some embodiments, the an anti-desmoglein 1 antibody, an anti-desmoglein 2 antibody, an anti-desmoglein 3 antibody, or an anti-desmoglein 4 antibody comprises a sequence as provided for herein. following table:

[0426] The antibodies, can also be in a scFv format, which are also illustrated herein and above.

[0427] In some embodiments, the antibody is linked to another antibody or therapeutic. In some embodiments, the anti-desmoglein 1 antibody, anti-desmoglein 2 antibody, anti-desmoglein 3 antibody, or anti-desmoglein 4 antibody is linked to a PD-1 antibody or a IL-2 mutein as provided herein or that is incorporated by reference.

[0428] In some embodiments, the anti-desmoglein 1 antibody, anti-desmoglein 2 antibody, anti-desmoglein 3 antibody, or anti-desmoglein 4 antibody comprises a sequence as provided for herein. In some embodiments, the antibody is in a scFV format as illustrated herein. In some embodiments, the antibody comprises a CDR of any one of the sequences provided for herein. In some embodiments, the amino acid residues of the CDRs provided herein contain mutations. In some embodiments, the CDRs contain 1, 2, 3, 4, 5, 6, 7, 8, 9, or 10 substitutions or mutations. In some embodiments, the substitution is a conservative substitution.

[0429] In some embodiments, in place of the skin tether, a gut tether, such as an anti-MAdCAM antibody is used. In some embodiments, the MAdCAM antibody is selected from the following table:

MAdCAM antibody Table 1

| Clone | | | | | | | |
|---|---|---|---|---|---|---|---|
| ID | CDR1 | CDR2 | CDR3 | LCDR1 | LCDR2 | LCDR3 | scFv |
| 1. | FTPS | AVIS | CTTS | QASQDI | AASSLQS | CQQGYSTPLTF | EVQLLESGGGLVQPGGSLRLSCAA |
| | SYGM | DDGS | KYYY | SKSLN | (SEQ ID | (SEQ ID NO: | SGFTFSSYGMHWVRQAPGKGLEWV |
| | H | DKYY | YYGM | (SEQ | NO: 76) | 77) | AVISDDGSDKYYADSVKGRFTISR |
| | (SEQ | A | DVW | ID NO: | | | DNSKNTLYLQMNSLRAEDTAVYYC |
| | ID | (SEQ | (SEQ | 75) | | | TTSKYYYYYGMDVWGQGTTVTVSS |
| | NO: | ID | ID | | | | GGGGSGGGGSGGGGSGGGGSDIQM |
| | 72) | NO: | NO: | | | | TQSPSSLSASVGDRVTITCQASQD |
| | | 73) | 74) | | | | ISKSLNWYQQKPGKAPKLLIYAAS |
| | | | | | | | SLQSGVPSRFSGSGSGTDFTLTIS |
| | | | | | | | SLQPEDFATYYCQQGYSTPLTFGG |
| | | | | | | | GTKVEIK (SEQ ID NO: 78) |
| 2. | YPFI | GUN | CARE | RASQSI | GASTLES | CQQTWGPPFTF | QVQLVQSGAEVKKPGASVKVSCKA |
| | GYYL | PSGG | GRLS | SSYLA | (SEQ ID | (SEQ ID NO: | SGYPFIGYYLHWVRQAPGQGLEWM |
| | H | STSY | YGMD | (SEQ | NO: 83) | 84) | GIINPSGGSTSYAQKFQGRVTMTR |
| | (SEQ | A | AW | ID NO: | | | DTSTSTVYMELSSLRSEDTAVYYC |
| | ID | (SEQ | (SEQ | 82) | | | AREGRLSYGMDAWGQGTLVTVSSG |
| | NO: | ID | ID | | | | GGGSGGGGSGGGGSGGGGSDIQMT |
| | 79) | NO: | NO: | | | | QSPSSLSASVGDRVTITCRASQSI |
| | | 80) | 81) | | | | SSYLAWYQQKPGKAPKLLIYGAST |
| | | | | | | | LESGVPSRFSGSGSGTDFTLTISS |
| | | | | | | | LQPEDFATYYCQQTWGPPFTFGQG |
| | | | | | | | TKLEIK (SEQ ID NO: 85) |
| 3. | YPFI | GUN | CARE | RASQSI | GASTLES | CQQTWGPPFTF | QVQLVQSGAEVKKPGASVKVSCKA |
| | GQYL | PSGG | GRLS | SSYLA | (SEQ ID | (SEQ ID NO: | SGYPFIGQYLHWVRQAPGQGLEWM |
| | H | STSY | YGMD | (SEQ | NO: 83) | 84) | GIINPSGGSTSYAQKFQGRVTMTR |
| | (SEQ | A | AW | ID NO: | | | DTSTSTVYMELSSLRSEDTAVYYC |
| | ID | (SEQ | (SEQ | 82) | | | AREGRLSYGMDAWGQGTLVTVSSG |
| | NO: | ID | ID | | | | GGGSGGGGSGGGGSGGGGSDIQMT |
| | 86) | NO: | NO: | | | | QSPSSLSASVGDRVTITCRASQSI |
| | | 80) | 81) | | | | SSYLAWYQQKPGKAPKLLIYGAST |
| | | | | | | | LESGVPSRFSGSGSGTDFTLTISS |
| | | | | | | | LQPEDFATYYCQQTWGPPFTFGQG |
| | | | | | | | TKLEIK (SEQ ID NO: 87) |
| 4. | GTFS | GSIN | CAKD | QASQDI | AASSLQS | CQQSYSSVITF | QVQLVQSGAEVKKPGASVKVSCKA |
| | SYAI | PSGD | KAQW | SNSLN | (SEQ ID | (SEQ ID NO: | SGGTFSSYAISWVRQAPGQGLEWM |
| | S | TTSY | LVGY | (SEQ | NO: 76) | 92) | GSINPSGDTTSYAQKFQGRVTMTR |
| | (SEQ | A | FDYW | ID NO: | | | DTSTSTVYMELSSLRSEDTAVYYC |
| | ID | (SEQ | (SEQ | 91) | | | AKDKAQWLVGYFDYWGQGTLVTVS |
| | NO: | ID | ID | | | | SGGGGSGGGGSGGGGSGGGGSDIQ |
| | 88) | NO: | NO: | | | | MTQSPSSLSASVGDRVTITCQASQ |
| | | 89) | 90) | | | | DISNSLNWYQQKPGKAPKLLIYAA |
| | | | | | | | SSLQSGVPSRFSGSGSGTDFTLTI |
| | | | | | | | SSLQPEDFATYYCQQSYSSVITFG |
| | | | | | | | QGTKVEIK (SEQ ID NO: 93) |
| 5. | FTPS | SSIS | CARE | RASQGI | GASSLQS | CQQANSFPFTF | EVQLLESGGGLVQPGGSLRLSCAA |
| | SYWM | PGGS | VQLS | SNSLA | (SEQ ID | (SEQ ID NO: | SGFTFSSYWMHWVRQAPGKGLEWV |
| | H | NIDY | HYDY | (SEQ | NO: 97) | 98) | SSISPGGSNIDYADSVKGRFTISR |
| | (SEQ | A | W | ID NO: | | | DNSKNTLYLQMNSLRAEDTAVYYC |
| | ID | (SEQ | (SEQ | 96) | | | AREVQLSHYDYWGQGTLVTVSSGG |
| | NO: | ID | ID | | | | GGSGGGGSGGGGSGGGGSDIQMTQ |
| | 93) | NO: | NO: | | | | SPSSLSASVGDRVTITCRASQGIS |
| | | 94) | 95) | | | | NSLAWYQQKPGKAPKLLIYGASSL |
| | | | | | | | QSGVPSRFSGSGSGTDFTLTISSL |
| | | | | | | | QPEDFATYYCQQANSFPFTFGQGT |
| | | | | | | | KVEIK (SEQ ID NO: 99) |
| 6. | FTFN | SRIN | CARE | RASQII | GASSLQS | CQQSYRLPFTF | EVQLLESGGGLVQPGGSLRLSCAA |
| | NYAF | SYGT | GPVA | GTNLA | (SEQ ID | (SEQ ID NO: | SGFTFNNYAFHWVRQAPGKGLEWV |
| | H | STTY | GYWY | (SEQ | NO: 97) | 104) | SRINSYGTSTTYADSVKGRFTISR |
| | (SEQ | A | FDLW | ID NO: | | | DNSKNTLYLQMNSLRAEDTAVYYC |
| | ID | (SEQ | (SEQ | 103) | | | AREGPVAGYWYFDLWGQGTLVTVS |
| | NO: | ID | ID | | | | SGGGGSGGGGSGGGGSGGGGSDIQ |
| | 100) | NO: | NO: | | | | MTQSPSSLSASVGDRVTITCRASQ |
| | | 101) | 102) | | | | IIGTNLAWYQQKPGKAPKLLIYGA |
| | | | | | | | SSLQSGVPSRFSGSGSGTDFTLTI |
| | | | | | | | SSLQPEDFATYYCQQSYRLPFTFG |
| | | | | | | | QGTKVEIK (SEQ ID NO: |
| | | | | | | | 105) |
| 7. | YTFT | GUN | CAKD | RASQNI | AASSLQS | CQQSYTTPYTF | QVQLVQSGAEVKKPGASVKVSCKA |
| | GYHI | PSGG | WSSW | SSSLN | (SEQ ID | (SEQ ID NO: | SGYTFTGYHIHWVRQAPGQGLEWM |
| | H | STIY | YLGP | (SEQ | NO: 76) | 110) | GIINPSGGSTIYAQKFQGRVTMTR |
| | (SEQ | A | FDYW | ID NO: | | | DTSTSTVYMELSSLRSEDTAVYYC |
| | ID | (SEQ | (SEQ | 109) | | | AKDWSSWYLGPFDYWGQGTLVTVS |
| | NO: | ID | ID | | | | SGGGGSGGGGSGGGGSGGGGSDIQ |
| | 106) | NO: | NO: | | | | MTQSPSSLSASVGDRVTITCRASQ |
| | | 107) | 108) | | | | NISSSLNWYQQKPGKAPKLLIYAA |
| | | | | | | | SSLQSGVPSRFSGSGSGTDFTLTI |
| | | | | | | | SSLQPEDFATYYCQQSYTTPYTFG |
| | | | | | | | QGTKVEIK (SEQ ID NO: |
| | | | | | | | 111) |
| 8. | FMFG | SAIS | CAKD | RASQGI | DASSLES | CQQTHSFPSTF | EVQLLESGGGLVQPGGSLRLSCAA |
| | DYAM | GSGG | LWA | SNNLN | (SEQ ID | (SEQ ID NO: | SGFMFGDYAMHWVRQAPGKGLEWV |
| | H | STYY | GIWY | (SEQ | NO: | 117) | SAISGSGGSTYYADSVKGRFTISR |
| | (SEQ | A | FDLW | ID NO: | 116) | | DNSKNTLYLQMNSLRAEDTAVYYC |
| | ID | (SEQ | (SEQ | 115) | | | AKDLVVAGIWYFDLWGRGTLVTVS |
| | NO: | ID | ID | | | | SGGGGSGGGGSGGGGSGGGGSDIQ |
| | 112) | NO: | NO: | | | | MTQSPSSLSASVGDRVTITCRASQ |
| | | 113) | 114) | | | | GISNNLNWYQQKPGKAPKLLIYDA |
| | | | | | | | SSLESGVPSRFSGSGSGTDFTLTI |
| | | | | | | | SSLQPEDFATYYCQQTHSFPSTFG |
| | | | | | | | QGTKLEIK (SEQ ID NO: |
| | | | | | | | 118) |
| 9. | FTFS | SVIG | CAAD | RASQGI | AASTLQS | CQQSYSTPWTF | EVQLLESGGGLVQPGGSLRLSCAA |
| | DYYM | ESGG | PVSR | SSSLA | (SEQ ID | (SEQ ID NO: | SGFTFSDYYMNWVRQAPGKGLEWV |
| | N | STYY | WPKH | (SEQ | NO: | 124) | SVIGESGGSTYYADSVKGRFTISR |
| | (SEQ | A | GGGD | ID NO: | 123) | | DNSKNTLYLQMNSLRAEDTAVYYC |
| | ID | (SEQ | YW | 122) | | | AADPVSRWPKHGGGDYWGQGTLVT |
| | NO: | ID | (SEQ | | | | VSSGGGGSGGGGSGGGGSGGGGSD |
| | 119) | NO: | ID | | | | IQMTQSPSSLSASVGDRVTITCRA |
| | | 120) | NO: | | | | SQGISSSLAWYQQKPGKAPKLLIY |
| | | | 121) | | | | AASTLQSGVPSRFSGSGSGTDFTL |
| | | | | | | | TISSLQPEDFATYYCQQSYSTPWT |
| | | | | | | | FGQGTKVEIK (SEQ ID NO: |
| | | | | | | | 125) |
| 10. | YTLT | GWIN | CAKG | RASDNI | AASSLQS | CQQGYSTPPTF | QVQLVQSGAEVKKPGASVKVSCKA |
| | TWYM | PNRG | DLWG | GSWLA | (SEQ ID | (SEQ ID NO: | SGYTLTTWYMYWVRQAPGQGLEWM |
| | Y | ATNY | AMDV | (SEQ | NO: 76) | 130) | GWINPNRGATNYAQKFQGRVTMTR |
| | (SEQ | A | W | ID NO: | | | DTSTSTVYMELSSLRSEDTAVYYC |
| | ID | (SEQ | (SEQ | 129) | | | AKGDLWGAMDVWGQGTLVTVSSGG |
| | NO: | ID | ID | | | | GGSGGGGSGGGGSGGGGSDIQMTQ |
| | 126) | NO: | NO: | | | | SPSSLSASVGDRVTITCRASDNIG |
| | | 127) | 128) | | | | SWLAWYQQKPGKAPKLLIYAASSL |
| | | | | | | | QSGVPSRFSGSGSGTDFTLTISSL |
| | | | | | | | QPEDFATYYCQQGYSTPPTFGQGT |
| | | | | | | | KVEIK (SEQ ID NO: 131) |
| 11. | YTFT | GGFD | CARH | RASESI | AASTLQS | CQQSYSVPFTF | QVQLVQSGAEVKKPGASVKVSCKA |
| | TYYM | PEDG | AVAG | SNWLA | (SEQ ID | (SEQ ID NO: | SGYTFTTYYMHWVRQAPGQGLEWM |
| | H | ETIY | AVGA | (SEQ | NO: | 136) | GGFDPEDGETIYAQKFQGRVTMTR |
| | (SEQ | A | GYYY | ID NO: | 123) | | DTSTSTVYMELSSLRSEDTAVYYC |
| | ID | (SEQ | YGMD | 135) | | | ARHAVAGAVGAGYYYYGMDVWGQG |
| | NO: | ID | VW | | | | TMVTVSSGGGGSGGGGSGGGGSGG |
| | 132) | NO: | (SEQ | | | | GGSDIQMTQSPSSLSASVGDRVTI |
| | | 133) | ID | | | | TCRASESISNWLAWYQQKPGKAPK |
| | | | NO: | | | | LLIYAASTLQSGVPSRFSGSGSGT |
| | | | 134) | | | | DFTLTISSLQPEDFATYYCQQSYS |
| | | | | | | | VPFTFGPGTKVDIK (SEQ ID |
| | | | | | | | NO: 137) |
| 12. | YTFT | GWIG | CARD | RSSQSL | SSSNRAP | CMQALHIPLTF | QVQLVQSGAEVKKPGASVKVSCKA |
| | GYYM | PNSG | LDHN | LHSNGY | (SEQ ID | (SEQ ID NO: | SGYTFTGYYMHWVRQAPGQGLEWM |
| | H | DTNY | WYFD | NYLD | NO: | 143) | GWIGPNSGDTNYAQKFQGRVTMTR |
| | (SEQ | A | LW | (SEQ | 142) | | DTSTSTVYMELSSLRSEDTAVYYC |
| | ID | (SEQ | (SEQ | ID NO: | | | ARDLDHNWYFDLWGRGTLVTVSSG |
| | NO: | ID | ID | 141) | | | GGGSGGGGSGGGGSGGGGSDIVMT |
| | 138) | NO: | NO: | | | | QSPLSLPVTPGEPASISCRSSQSL |
| | | 139) | 140) | | | | LHSNGYNYLDWYLQKPGQSPQLLI |
| | | | | | | | YSSSNRAPGVPDRFSGSGSGTDFT |
| | | | | | | | LKISRVEAEDVGVYYCMQALHIPL |
| | | | | | | | TFGGGTKVEIK (SEQ ID NO: |
| | | | | | | | 144) |
| 13. | FTFD | SYID | CARD | QASQDI | RASTLES | CQQSYSTPITF | EVQLLESGGGLVQPGGSLRLSCAA |
| | DYAM | ASGT | QAAA | SNYLN | (SEQ ID | (SEQ ID NO: | SGFTFDDYAMHWVRQAPGRGLEWV |
| | H | TIYY | GYWY | (SEQ | NO: | 150) | SYIDASGTTIYYADSVRGRFTISR |
| | (SEQ | A | FDLW | ID NO: | 149) | | DNSRNTLYLQMNSLRAEDTAVYYC |
| | ID | (SEQ | (SEQ | 148) | | | ARDQAAAGYWYFDLWGRGTLVTVS |
| | NO: | ID | ID | | | | SGGGGSGGGGSGGGGSGGGGSDIQ |
| | 145) | NO: | NO: | | | | MTQSPSSLSASVGDRVTITCQASQ |
| | | 146) | 147) | | | | DISNYLNWYQQRPGRAPRLLIYRA |
| | | | | | | | STLESGVPSRFSGSGSGTDFTLTI |
| | | | | | | | SSLQPEDFATYYCQQSYSTPITFG |
| | | | | | | | QGTRLEIR (SEQ ID NO: |
| | | | | | | | 151) |
| 14. | YTFT | GGIV | CARD | RSSQSL | SAYNRAS | CMQALQTPLTF | QVQLVQSGAEVRRPGSSVRVSCRA |
| | DYHI | PRSG | ESSG | LHSNGY | (SEQ ID | (SEQ ID NO: | SGYTFTDYHIHWVRQAPGQGLEWM |
| | H | STTY | WYYF | NYLD | NO: | 156) | GGIVPRSGSTTYAQRFQGRVTITA |
| | (SEQ | A | DYW | (SEQ | 155) | | DESTSTAYMELSSLRSEDTAVYYC |
| | ID | (SEQ | (SEQ | ID NO: | | | ARDESSGWYYFDYWGQGTLVTVSS |
| | NO: | ID | ID | 141) | | | GGGGSGGGGSGGGGSGGGGSDIVM |
| | 152) | NO: | NO: | | | | TQSPLSLPVTPGEPASISCRSSQS |
| | | 153) | 154) | | | | LLHSNGYNYLDWYLQRPGQSPQLL |
| | | | | | | | IYSAYNRASGVPDRFSGSGSGTDF |
| | | | | | | | TLRISRVEAEDVGVYYCMQALQTP |
| | | | | | | | LTFGQGTRVEIR (SEQ ID NO: |
| | | | | | | | 157) |
| 15. | YTFT | GGII | GARG | QANQDI | RASRLEA | CQQSSEIPYSF | QVQLVQSGAEVRRPGSSVRVSCRA |
| | NYYM | PIVD | RYTV | SNYLN | (SEQ ID | (SEQ ID NO: | SGYTFTNYYMHWVRQAPGQGLEWM |
| | H | RVKY | NYYY | (SEQ | NO: | 163) | GGIIPIVDRVRYAQRFQGRVTITA |
| | (SEQ | A | GMDV | ID NO: | 162) | | DESTSTAYMELSSLRSEDTAVYYC |
| | ID | (SEQ | W | 161) | | | ARGRYTVNYYYGMDVWGQGTTVTV |
| | NO: | ID | (SEQ | | | | SSGGGGSGGGGSGGGGSGGGGSDI |
| | 158) | NO: | ID | | | | QMTQSPSSLSASVGDRVTITCQAN |
| | | 159) | NO: | | | | QDISNYLNWYQQRPGRAPRLLIYR |
| | | | 160) | | | | ASRLEAGVPSRFSGSGSGTDFTLT |
| | | | | | | | ISSLQPEDFATYYCQQSSEIPYSF |
| | | | | | | | GQGTRLEIR (SEQ ID NO: |
| | | | | | | | 164) |
| 16. | FTFE | SYLN | CAKD | RASQSI | DASNLET | CQQSYTIPITF | EVQLLESGGGLVQPGGSLRLSCAA |
| | DYAM | SDGG | YCTN | STYLN | (SEQ ID | (SEQ ID NO: | SGFTFEDYAMHWVRQAPGKGLEWV |
| | H | STSY | GVCA | (SEQ | NO: | 170) | SYLNSDGGSTSYADSVKGRFTISR |
| | (SEQ | A | FDYW | ID NO: | 169) | | DNSKNTLYLQMNSLRAEDTAVYYC |
| | ID | (SEQ | (SEQ | 168) | | | AKDYCTNGVCAFDYWGQGTLVTVS |
| | NO: | ID | ID | | | | SGGGGSGGGGSGGGGSGGGGSDIQ |
| | 165) | NO: | NO: | | | | MTQSPSSLSASVGDRVTITCRASQ |
| | | 166) | 167) | | | | SISTYLNWYQQKPGKAPKLLIYDA |
| | | | | | | | SNLETGVPSRFSGSGSGTDFTLTI |
| | | | | | | | SSLQPEDFATYYCQQSYTIPITFG |
| | | | | | | | QGTRLEIK (SEQ ID NO: |
| | | | | | | | 171) |
| 17. | FTFS | SAIS | CVSD | RASQSI | AASRLEG | CQQANSFPLTF | EVQLLESGGGLVQPGGSLRLSCAA |
| | DSAM | GSGS | IAVA | STFLN | (SEQ ID | (SEQ ID NO: | SGFTFSDSAMHWVRQAPGKGLEWV |
| | H | TIYY | GHWY | (SEQ | NO: | 177) | SAISGSGSTIYYADSVKGRFTISR |
| | (SEQ | A | FDLW | ID NO: | 176) | | DNSKNTLYLQMNSLRAEDTAVYYC |
| | ID | (SEQ | (SEQ | 175) | | | VSDIAVAGHWYFDLWGRGTLVTVS |
| | NO: | ID | ID | | | | SGGGGSGGGGSGGGGSGGGGSDIQ |
| | 172) | NO: | NO: | | | | MTQSPSSLSASVGDRVTITCRASQ |
| | | 173) | 174) | | | | SISTFLNWYQQKPGKAPKLLIYAA |
| | | | | | | | SRLEGGVPSRFSGSGSGTDFTLTI |
| | | | | | | | SSLQPEDFATYYCQQANSFPLTFG |
| | | | | | | | PGTKVDIK (SEQ ID NO: |
| | | | | | | | 178) |
| 18. | FTFS | SYIS | GARA | RASQSI | AASSLQS | CQQSYSTPLTF | EVQLVESGGGLVKPGGSLRLSCAA |
| | SYWM | GDSG | NSSG | SSYLN | (SEQ ID | (SEQ ID NO: | SGFTFSSYWMSWVRQAPGKGLEWV |
| | S | YTNY | WYDW | (SEQ | NO: 76) | 183) | SYISGDSGYTNYAAPVKGRFTISR |
| | (SEQ | A | YFDL | ID NO: | | | DDSKNTLYLQMNSLKTEDTAVYYC |
| | ID | (SEQ | W | 182) | | | ARANSSGWYDWYFDLWGRGTLVTV |
| | NO: | ID | (SEQ | | | | SSGGGGSGGGGSGGGGSGGGGSDI |
| | 179) | NO: | ID | | | | QMTQSPSSLSASVGDRVTITCRAS |
| | | 180) | NO: | | | | QSISSYLNWYQQKPGKAPKLLIYA |
| | | | 181) | | | | ASSLQSGVPSRFSGSGSGTDFTLT |
| | | | | | | | ISSLQPEDFATYYCQQSYSTPLTF |
| | | | | | | | GGGTKVEIK (SEQ ID NO: |
| | | | | | | | 184) |
| 19. | FTFD | SGIS | CAKD | QASQDI | DASNLET | CQQSYSTPLTF | EVQLLESGGGLVQPGGSLRLSCAA |
| | DYAM | WNSG | IVAA | SNYLN | (SEQ ID | (SEQ ID NO: | SGFTFDDYAMHWVRQAPGKGLEWV |
| | H | SIGY | GHYY | (SEQ | NO: | 183) | SGISWNSGSIGYADSVKGRFTISR |
| | (SEQ | A | YGMD | ID NO: | 169) | | DNSKNTLYLQMNSLRAEDTAVYYC |
| | ID | (SEQ | VW | 148) | | | AKDIVAAGHYYYGMDVWGQGTTVT |
| | NO: | ID | (SEQ | | | | VSSGGGGSGGGGSGGGGSGGGGSD |
| | 145) | NO: | ID | | | | IQMTQSPSSLSASVGDRVTITCQA |
| | | 185) | NO: | | | | SQDISNYLNWYQQKPGKAPKLLIY |
| | | | 186) | | | | DASNLETGVPSRFSGSGSGTDFTL |
| | | | | | | | TISSLQPEDFATYYCQQSYSTPLT |
| | | | | | | | FGGGTKVEIK (SEQ ID NO: |
| | | | | | | | 187) |
| 20. | FTFD | SYID | CARD | QAGQDI | DASNLET | CQQTYSTPITF | EVQLLESGGGLVQPGGSLRLSCAA |
| | DYAM | TSSS | EAAA | SNYLN | (SEQ ID | (SEQ ID NO: | SGFTFDDYAMHWVRQAPGKGLEWV |
| | H | HLYY | GYYG | (SEQ | NO: | 191) | SYIDTSSSHLYYADSVKGRFTISR |
| | (SEQ | A | MDVW | ID NO: | 169) | | DNSKNTLYLQMNSLRAEDTAVYYC |
| | ID | (SEQ | (SEQ | 190) | | | ARDEAAAGYYGMDVWGQGTTVTVS |
| | NO: | ID | ID | | | | SGGGGSGGGGSGGGGSGGGGSDIQ |
| | 145) | NO: | NO: | | | | MTQSPSSLSASVGDRVTITCQAGQ |
| | | 188) | 189) | | | | DISNYLNWYQQKPGKAPKLLIYDA |
| | | | | | | | SNLETGVPSRFSGSGSGTDFTLTI |
| | | | | | | | SSLQPEDFATYYCQQTYSTPITFG |
| | | | | | | | QGTKLEIK (SEQ ID NO: |
| | | | | | | | 192) |
| 21. | FTFS | STIV | CARD | RASQDI | AASSLQS | CQQSYSIPPTF | EVQLLESGGGLVQPGGSLRLSCAA |
| | NAWM | GNGG | NPLR | SNYLN | (SEQ ID | (SEQ ID NO: | SGFTFSNAWMSWVRQAPGKGLEWV |
| | S | ATYY | WQGM | (SEQ | NO: 76) | 197) | STIVGNGGATYYADSVKGRFTISR |
| | (SEQ | A | DVW | ID NO: | | | DNSKNTLYLQMNSLRAEDTAVYYC |
| | ID | (SEQ | (SEQ | 196) | | | ARDNPLRWQGMDVWGQGTLVTVSS |
| | NO: | ID | ID | | | | GGGGSGGGGSGGGGSGGGGSDIQM |
| | 193) | NO: | NO: | | | | TQSPSSLSASVGDRVTITCRASQD |
| | | 194) | 195) | | | | ISNYLNWYQQKPGKAPKLLIYAAS |
| | | | | | | | SLQSGVPSRFSGSGSGTDFTLTIS |
| | | | | | | | SLQPEDFATYYCQQSYSIPPTFGP |
| | | | | | | | GTKVDIK (SEQ ID NO: 198) |
| 22. | FTFS | SYIS | CARA | RASQSI | AASSLQS | CQQSYSTPLTF | EVQLLESGGGLVQPGGSLRLSCAA |
| | SYQM | SSST | NSSS | SSYLN | (SEQ ID | (SEQ ID NO: | SGFTFSSYQMSWVRQAPGKGLEWV |
| | S | YTNY | WYDW | (SEQ | NO: 76) | 183) | SYISSSSTYTNYADSVKGRFTISR |
| | (SEQ | A | YFDL | ID NO: | | | DNSKNTLYLQMNSLRAEDTAVYYC |
| | ID | (SEQ | W | 182) | | | ARANSSSWYDWYFDLWGQGTLVTV |
| | NO: | ID | (SEQ | | | | SSGGGGSGGGGSGGGGSGGGGSDI |
| | 199) | NO: | ID | | | | QMTQSPSSLSASVGDRVTITCRAS |
| | | 200) | NO: | | | | QSISSYLNWYQQKPGKAPKLLIYA |
| | | | 201) | | | | ASSLQSGVPSRFSGSGSGTDFTLT |
| | | | | | | | ISSLQPEDFATYYCQQSYSTPLTF |
| | | | | | | | GGGTKVEIK (SEQ ID NO: |
| | | | | | | | 202) |
| 23. | FTFS | SGIS | CATS | RASQSI | AASNLQR | CQQSYSIPITF | EVQLLESGGGLVQPGGSLRLSCAA |
| | SYAM | GSGG | QAPV | SSWLA | (SEQ ID | (SEQ ID NO: | SGFTFSSYAMHWVRQAPGKGLEWV |
| | H | SAYY | DYYY | (SEQ | NO: | 208) | SGISGSGGSAYYADSVKGRFTISR |
| | (SEQ | A | YGMD | ID NO: | 207) | | DNSKNTLYLQMNSLRAEDTAVYYC |
| | ID | (SEQ | VW | 206) | | | ATSQAPVDYYYYGMDVWGQGTTVT |
| | NO: | ID | (SEQ | | | | VSSGGGGSGGGGSGGGGSGGGGSD |
| | 203) | NO: | ID | | | | IQMTQSPSSLSASVGDRVTITCRA |
| | | 204) | NO: | | | | SQSISSWLAWYQQKPGKAPKLLIY |
| | | | 205) | | | | AASNLQRGVPSRFSGSGSGTDFTL |
| | | | | | | | TISSLQPEDFATYYCQQSYSIPIT |
| | | | | | | | FGQGTKVEIK (SEQ ID NO: |
| | | | | | | | 209) |
| 24. | FTFS | SYIS | CARV | RASQSI | AASSLQS | CQQSYSTPLTF | EVQLVESGGGLVKPGGSLRLSCAA |
| | SYWM | GSSS | GSSG | SSYLN | (SEQ ID | (SEQ ID NO: | SGFTFSSYWMSWVRQAPGKGLEWV |
| | S | YTNY | WYDW | (SEQ | NO: 76) | 183) | SYISGSSSYTNYAAPVKGRFTISR |
| | (SEQ | A | YFDL | ID NO: | | | DDSKNTLYLQMNSLKTEDTAVYYC |
| | ID | (SEQ | W | 182) | | | ARVGSSGWYDWYFDLWGRGTLVTV |
| | NO: | ID | (SEQ | | | | SSGGGGSGGGGSGGGGSGGGGSDI |
| | 179) | NO: | ID | | | | QMTQSPSSLSASVGDRVTITCRAS |
| | | 210) | NO: | | | | QSISSYLNWYQQKPGKAPKLLIYA |
| | | | 211) | | | | ASSLQSGVPSRFSGSGSGTDFTLT |
| | | | | | | | ISSLQPEDFATYYCQQSYSTPLTF |
| | | | | | | | GQGTKVEIK (SEQ ID NO: |
| | | | | | | | 212) |
| 25. | YTLT | GWIN | CAKG | RASDNI | AASSLQS | CQQGYSTPPTF | QVQLVQSGAEVKKPGASVKVSCKA |
| | TWYM | PNRG | DLWG | GSWLA | (SEQ ID | (SEQ ID NO: | SGYTLTTWYMYWVRQAPGQGLEWM |
| | Y | ATNY | AMDV | (SEQ | NO: 76) | 130) | GWINPNRGATNYAQKFQGRVTMTR |
| | (SEQ | A | W | ID NO: | | | DTSTSTVYMELSSLRSEDTAVYYC |
| | ID | (SEQ | (SEQ | 129) | | | AKGDLWGAMDVWGQGTLVTVSSGG |
| | NO: | ID | ID | | | | GGSGGGGSGGGGSGGGGSDIQMTQ |
| | 126) | NO: | NO: | | | | SPSSLSASVGDRVTITCRASDNIG |
| | | 127) | 128) | | | | SWLAWYQQKPGKAPKLLIYAASSL |
| | | | | | | | QSGVPSRFSGSGSGTDFTLTISSL |
| | | | | | | | QPEDFATYYCQQGYSTPPTFGQGT |
| | | | | | | | KVEIK (SEQ ID NO: 131) |
| 26. | YTLT | GWIN | CAKG | RASDNI | AASSLQS | CQQGYSTPPTF | QVQLVQSGAEVKKPGASVKVSCKA |
| | TWYM | PNRG | DLWG | GSWLA | (SEQ ID | (SEQ ID NO: | SGYTLTTWYMYWVRQAPGQGLEWM |
| | Y | ATNY | AMDV | (SEQ | NO: 76) | 130) | GWINPNRGATNYAQKFQGRVTMTR |
| | (SEQ | A | W | ID NO: | | | DTSTSTVYMELSSLRSEDTAVYYC |
| | ID | (SEQ | (SEQ | 129) | | | AKGDLWGAMDVWGQGTTVTVSSGG |
| | NO: | ID | ID | | | | GGSGGGGSGGGGSGGGGSDIQMTQ |
| | 126) | NO: | NO: | | | | SPSSLSASVGDRVTITCRASDNIG |
| | | 127) | 128) | | | | SWLAWYQQKPGKAPKLLIYAASSL |
| | | | | | | | QSGVPSRFSGSGSGTDFTLTISSL |
| | | | | | | | QPEDFATYYCQQGYSTPPTFGQGT |
| | | | | | | | KVEIK (SEQ ID NO: 213) |
| 27. | YTET | GWMN | CARD | RASQSI | AASSLQS | CQQSYTAPYTF | QVQLVQSGAEVKKPGASVKVSCKA |
| | GYYI | PNSG | PGEL | SSYLH | (SEQ ID | (SEQ ID NO: | SGYTFTGYYIHWVRQAPGQGLEWM |
| | H | NTGY | GYCS | (SEQ | NO: 76) | 218) | GWMNPNSGNTGYAQKFQGRVTMTR |
| | (SEQ | A | GGSC | ID NO: | | | DTSTSTVYMELSSLRSEDTAVYYC |
| | ID | (SEQ | YDGW | 217) | | | ARDPGFLGYCSGGSCYDGWFDPWG |
| | NO: | ID | FDPW | | | | QGTLVTVSSGGGGSGGGGSGGGGS |
| | 214) | NO: | (SEQ | | | | GGGGSDIQMTQSPSSLSASVGDRV |
| | | 215) | ID | | | | TITCRASQSISSYLHWYQQKPGKA |
| | | | NO: | | | | PKLLIYAASSLQSGVPSRFSGSGS |
| | | | 216) | | | | GTDFTLTISSLQPEDFATYYCQQS |
| | | | | | | | YTAPYTFGQGTKLEIK (SEQ ID |
| | | | | | | | NO: 219) |
| 28. | YTFT | GWMN | CARE | RASQGI | DASNLET | CQQSYSTPLTF | QVQLVQSGAEVKKPGASVKVSCKA |
| | DYFL | PTSG | GEGS | NSWLA | (SEQ ID | (SEQ ID NO: | SGYTFTDYFLHWVRQAPGQGLEWM |
| | H | NTGY | GFDY | (SEQ | NO: | 183) | GWMNPTSGNTGYAQKFQGRVTMTR |
| | (SEQ | A | W | ID NO: | 169) | | DTSTSTVYMELSSLRSEDTAVYYC |
| | ID | (SEQ | (SEQ | 223) | | | AREGEGSGFDYWGQGTLVTVSSGG |
| | NO: | ID | ID | | | | GGSGGGGSGGGGSGGGGSDIQMTQ |
| | 220) | NO: | NO: | | | | SPSSLSASVGDRVTITCRASQGIN |
| | | 221) | 222) | | | | SWLAWYQQKPGKAPKLLIYDASNL |
| | | | | | | | ETGVPSRFSGSGSGTDFTLTISSL |
| | | | | | | | QPEDFATYYCQQSYSTPLTFGGGT |
| | | | | | | | KVEIK (SEQ ID NO: 224) |
| 29. | YTFT | AWMN | CARD | RASQGI | AASSLQS | CQQSYSTPWTF | QVQLVQSGAEVKKPGASVKVSCKA |
| | SYYM | PNSG | YDFW | SNYLA | (SEQ ID | (SEQ ID NO: | SGYTFTSYYMHWVRQAPGQGLEWM |
| | H | NTGY | SGSL | (SEQ | NO: 76) | 124) | AWMNPNSGNTGYAQKFQGRVTMTR |
| | (SEQ | A | GYW | ID NO: | | | DTSTSTVYMELSSLRSEDTAVYYC |
| | ID | (SEQ | (SEQ | 228) | | | ARDYDFWSGSLGYWGQGTLVTVSS |
| | NO: | ID | ID | | | | GGGGSGGGGSGGGGSGGGGSDIQM |
| | 225) | NO: | NO: | | | | TQSPSSLSASVGDRVTITCRASQG |
| | | 226) | 227) | | | | ISNYLAWYQQKPGKAPKLLIYAAS |
| | | | | | | | SLQSGVPSRFSGSGSGTDFTLTIS |
| | | | | | | | SLQPEDFATYYCQQSYSTPWTFGQ |
| | | | | | | | GTKVEIK (SEQ ID NO: 229) |
| 30. | YTLT | GWIN | CAKG | RASDNI | AASSLQS | CQQGYSTPPTF | QVQLVQSGAEVKKPGASVKVSCKA |
| | TWYM | PNRG | DLWG | GSWLA | (SEQ ID | (SEQ ID NO: | SGYTLTTWYMYWVRQAPGQGLEWM |
| | Y | ATNY | AMDV | (SEQ | NO: 76) | 130) | GWINPNRGATNYAQKFQGRVTMTR |
| | (SEQ | A | W | ID NO: | | | DTSTSTVYMELSSLRSEDTAVYYC |
| | ID | (SEQ | (SEQ | 129) | | | AKGDLWGAMDVWGQGTLVTVSSGG |
| | NO: | ID | ID | | | | GGSGGGGSGGGGSGGGGSDIQMTQ |
| | 126) | NO: | NO: | | | | SPSSLSASVGDRVTITCRASDNIG |
| | | 127) | 128) | | | | SWLAWYQQKPGKAPKLLIYAASSL |
| | | | | | | | QSGVPSRFSGSGSGTDFTLTISSL |
| | | | | | | | QPEDFATYYCQQGYSTPPTFGQGT |
| | | | | | | | KVEIK (SEQ ID NO: 230) |
| 31. | YTFT | GUN | CARD | RASQSI | DASNLQS | CQQSYSIPITF | QVQLVQSGAEVKKPGASVKVSCKA |
| | SYYM | PSGG | TGYS | GRWLA | (SEQ ID | (SEQ ID NO: | SGYTFTSYYMHWVRQAPGQGLEWM |
| | H | STSY | YGRY | (SEQ | NO: | 208) | GIINPSGGSTSYAQKFQGRVTMTR |
| | (SEQ | A | YYYG | ID NO: | 233) | | DTSTSTVYMELSSLRSEDTAVYYC |
| | ID | (SEQ | MDVW | 232) | | | ARDTGYSYGRYYYYGMDVWGQGTL |
| | NO: | ID | (SEQ | | | | VTVSSGGGGSGGGGSGGGGSGGGG |
| | 225) | NO: | ID | | | | SDIQMTQSPSSLSASVGDRVTITC |
| | | 80) | NO: | | | | RASQSIGRWLAWYQQKPGKAPKLL |
| | | | 231) | | | | IYDASNLQSGVPSRFSGSGSGTDF |
| | | | | | | | TLTISSLQPEDFATYYCQQSYSIP |
| | | | | | | | ITFGQGTKVEIK (SEQ ID NO: |
| | | | | | | | 234) |
| 32. | YTLT | GUN | CARE | RASQGI | AASSLQS | CQQSYSTPLTF | QVQLVQSGAEVKKPGASVKVSCKA |
| | DYYM | PSGG | EYSS | SSWLA | (SEQ ID | (SEQ ID NO: | SGYTLTDYYMHWVRQAPGQGLEWM |
| | H | STSY | SSGY | (SEQ | NO: 76) | 183) | GIINPSGGSTSYAQKFQGRVTMTR |
| | (SEQ | A | FDYW | ID NO: | | | DTSTSTVYMELSSLRSEDTAVYYC |
| | ID | (SEQ | (SEQ | 237) | | | AREEYSSSSGYFDYWGQGTLVTVS |
| | NO: | ID | ID | | | | SGGGGSGGGGSGGGGSGGGGSDIQ |
| | 235) | NO: | NO: | | | | MTQSPSSLSASVGDRVTITCRASQ |
| | | 80) | 236) | | | | GISSWLAWYQQKPGKAPKLLIYAA |
| | | | | | | | SSLQSGVPSRFSGSGSGTDFTLTI |
| | | | | | | | SSLQPEDFATYYCQQSYSTPLTFG |
| | | | | | | | QGTKVEIK (SEQ ID NO: |
| | | | | | | | 238) |
| 33. | YTET | GWMH | CARD | RASQSI | AASSLQS | CQQSYSVPITF | QVQLVQSGAEVKKPGASVKVSCKA |
| | SYGI | PKSG | TPYY | SSWLA | (SEQ ID | (SEQ ID NO: | SGYTFTSYGISWVRQAPGQGLEWM |
| | S | DTGL | YYGM | (SEQ | NO: 76) | 242) | GWMHPKSGDTGLTQKFQGRVTMTR |
| | (SEQ | T | DVW | ID NO: | | | DTSTSTVYMELSSLRSEDTAVYYC |
| | ID | (SEQ | (SEQ | 206) | | | ARDTPYYYYGMDVWGQGTTVTVSS |
| | NO: | ID | ID | | | | GGGGSGGGGSGGGGSGGGGSDIQM |
| | 239) | NO: | NO: | | | | TQSPSSLSASVGDRVTITCRASQS |
| | | 240) | 241) | | | | ISSWLAWYQQKPGKAPKLLIYAAS |
| | | | | | | | SLQSGVPSRFSGSGSGTDFTLTIS |
| | | | | | | | SLQPEDFATYYCQQSYSVPITFGQ |
| | | | | | | | GTKVEIK (SEQ ID NO: 243) |
| 34. | FTFG | SYIS | CARD | RASQSI | AASSLQS | CQQSYSTPLTF | EVQLVESGGGLVKPGGSLRLSCAA |
| | DYAM | GDIG | VAAT | SSYLN | (SEQ ID | (SEQ ID NO: | SGFTFGDYAMSWVRQAPGKGLEWV |
| | S | YTNY | GNWY | (SEQ | NO: 76) | 183) | SYISGDIGYTNYAAPVKGRFTISR |
| | (SEQ | A | FDLW | ID NO: | | | DDSKNTLYLQMNSLKTEDTAVYYC |
| | ID | (SEQ | (SEQ | 182) | | | ARDVAATGNWYFDLWGRGTLVTVS |
| | NO: | ID | ID | | | | SGGGGSGGGGSGGGGSGGGGSDIQ |
| | 244) | NO: | NO: | | | | MTQSPSSLSASVGDRVTITCRASQ |
| | | 245) | 246) | | | | SISSYLNWYQQKPGKAPKLLIYAA |
| | | | | | | | SSLQSGVPSRFSGSGSGTDFTLTI |
| | | | | | | | SSLQPEDFATYYCQQSYSTPLTFG |
| | | | | | | | GGTKVEIK (SEQ ID NO: |
| | | | | | | | 247) |
| 35. | FSFS | SFIT | CARD | RASQSV | GAST RAT | CQQYGSSPLTF | EVQLLESGGGLVQPGGSLRLSCAA |
| | SYTM | SSSR | RRGD | RNYLA | (SEQ ID | (SEQ ID NO: | SGFSFSSYTMNWVRQAPGKGLEWV |
| | N | TIYY | YGDS | (SEQ | NO: | 253) | SFITSSSRTIYYADSVKGRFTISR |
| | (SEQ | A | WYFD | ID NO: | 252) | | DNSKNTLYLQMNSLRAEDTAVYYC |
| | ID | (SEQ | LW | 251) | | | ARDRRGDYGDSWYFDLWGRGTLVT |
| | NO: | ID | (SEQ | | | | VSSGGGGSGGGGSGGGGSGGGGSE |
| | 248) | NO: | ID | | | | IVMTQSPATLSVSPGERATLSCRA |
| | | 249) | NO: | | | | SQSVRNYLAWYQQKPGQAPRLLIY |
| | | | 250) | | | | GASTRATGIPARFSGSGSGTEFTL |
| | | | | | | | TISSLQSEDFAVYYCQQYGSSPLT |
| | | | | | | | FGGGTKVEIK (SEQ ID NO: |
| | | | | | | | 254) |
| 36. | YTFT | GUN | CARD | RASQSI | DASNLQS | CQQSYSIPITF | QVQLVQSGAEVKKPGASVKVSCKA |
| | GHYM | PSGG | TGYS | GRWLA | (SEQ ID | (SEQ ID NO: | SGYTFTGHYMHWVRQAPGQGLEWM |
| | H | STSY | YGRY | (SEQ | NO: | 208) | GIINPSGGSTSYAQKFQGRVTMTR |
| | (SEQ | A | YYYG | ID NO: | 233) | | DTSTSTVYMELSSLRSEDTAVYYC |
| | ID | (SEQ | MDVW | 232) | | | ARDTGYSYGRYYYYGMDVWGQGTT |
| | NO: | ID | (SEQ | | | | VTVSSGGGGSGGGGSGGGGSGGGG |
| | 255) | NO: | ID | | | | SDIQMTQSPSSLSASVGDRVTITC |
| | | 80) | NO: 2 | | | | RASQSIGRWLAWYQQKPGKAPKLL |
| | | | 31) | | | | IYDASNLQSGVPSRFSGSGSGTDF |
| | | | | | | | TLTISSLQPEDFATYYCQQSYSIP |
| | | | | | | | ITFGGGTKVEIK (SEQ ID NO: |
| | | | | | | | 256) |
| 37. | YTFS | GWMN | CARG | RASQSI | AASTLQS | CQQSYSTPWTF | QVQLVQSGAEVKKPGASVKVSCKA |
| | KHFV | PNSG | EGGY | SSWLA | (SEQ ID | (SEQ ID NO: | SGYTFSKHFVHWVRQAPGQGLEWM |
| | H | NSGY | YYYG | (SEQ | NO: | 124) | GWMNPNSGNSGYAQKFQGRVTMTR |
| | (SEQ | A | MDVW | ID NO: | 123) | | DTSTSTVYMELSSLRSEDTAVYYC |
| | ID | (SEQ | (SEQ | 206) | | | ARGEGGYYYYGMDVWGQGTLVTVS |
| | NO: | ID | ID | | | | SGGGGSGGGGSGGGGSGGGGSDIQ |
| | 257) | NO: | NO: | | | | MTQSPSSLSASVGDRVTITCRASQ |
| | | 258) | 259) | | | | SISSWLAWYQQKPGKAPKLLIYAA |
| | | | | | | | STLQSGVPSRFSGSGSGTDFTLTI |
| | | | | | | | SSLQPEDFATYYCQQSYSTPWTFG |
| | | | | | | | QGTKVEIK (SEQ ID NO: |
| | | | | | | | 260) |
| 38. | FTFG | SAIG | CAKG | RASQPL | AASSLQS | CQQAISFPLTF | EVQLLESGGGLVQPGGSLRLSCAA |
| | SYSM | TGGG | TPYY | SNWLA | (SEQ ID | (SEQ ID NO: | SGFTFGSYSMSWVRQAPGKGLEWV |
| | S | TYYA | YYYG | (SEQ | NO: 76) | 265) | SAIGTGGGTYYADSVKGRFTISRD |
| | (SEQ | (SEQ | MDVW | ID NO: | | | NSKNTLYLQMNSLRAEDTAVYYCA |
| | ID | ID | (SEQ | 264) | | | KGTPYYYYYGMDVWGQGTMVTVSS |
| | NO: | NO: | ID | | | | GGGGSGGGGSGGGGSGGGGSDIQM |
| | 261) | 262) | NO: | | | | TQSPSSLSASVGDRVTITCRASQP |
| | | | 263) | | | | LSNWLAWYQQKPGKAPKLLIYAAS |
| | | | | | | | SLQSGVPSRFSGSGSGTDFTLTIS |
| | | | | | | | SLQPEDFATYYCQQAISFPLTFGG |
| | | | | | | | GTKVEIK (SEQ ID NO: 266) |
| 39. | YTFT | GWMN | CARD | QSSEDI | AASSLQI | CQQTYSTPYTF | QVQLVQSGAEVKKPGASVKVSCKA |
| | SYYM | PNSG | LGYY | SSSLN | (SEQ ID | (SEQ ID NO: | SGYTFTSYYMHWVRQAPGQGLEWM |
| | H | NTGY | DSSG | (SEQ | NO: | 270) | GWMNPNSGNTGYAQKFQGRVTMTR |
| | (SEQ | A | YFGA | ID NO: | 269) | | DTSTSTVYMELSSLRSEDTAVYYC |
| | ID | (SEQ | FDIW | 268) | | | ARDLGYYDSSGYFGAFDIWGQGTT |
| | NO: | ID | (SEQ | | | | VTVSSGGGGSGGGGSGGGGSGGGG |
| | 225) | NO: | ID | | | | SDIQMTQSPSSLSASVGDRVTITC |
| | | 215) | NO: | | | | QSSEDISSSLNWYQQKPGKAPKLL |
| | | | 267) | | | | IYAASSLQIGVPSRFSGSGSGTDF |
| | | | | | | | TLTISSLQPEDFATYYCQQTYSTP |
| | | | | | | | YTFGQGTKVEIK (SEQ ID NO: |
| | | | | | | | 271) |
| 40. | YTFT | GUN | CARG | RASQGI | AASNLET | CQQIHSYPLTF | QVQLVQSGAEVKKPGASVKVSCKA |
| | SYGI | PRGG | TRSS | GNWLA | (SEQ ID | (SEQ ID NO: | SGYTFTSYGISWVRQAPGQGLEWM |
| | S | STIF | GWYG | (SEQ | NO: | 276) | GIINPRGGSTIFAQKFQGRVTMTR |
| | (SEQ | A | WFDP | ID NO: | 275) | | DTSTSTVYMELSSLRSEDTAVYYC |
| | ID | (SEQ | W | 274) | | | ARGTRSSGWYGWFDPWGQGTLVTV |
| | NO: | ID | (SEQ | | | | SSGGGGSGGGGSGGGGSGGGGSDI |
| | 239) | NO: | ID | | | | QMTQSPSSLSASVGDRVTITCRAS |
| | | 272) | NO: | | | | QGIGNWLAWYQQKPGKAPKLLIYA |
| | | | 273) | | | | ASNLETGVPSRFSGSGSGTDFTLT |
| | | | | | | | ISSLQPEDFATYYCQQIHSYPLTF |
| | | | | | | | GGGTKVEIK (SEQ ID NO: |
| | | | | | | | 277) |
| 41. | FTFD | SYIS | CARE | RASQSI | AASSLQS | CQQSYSTPLTF | EVQLLESGGGLVQPGGSLRLSCAA |
| | DYGM | SSSS | IAAA | SSYLN | (SEQ ID | (SEQ ID NO: | SGFTFDDYGMSWVRQAPGKGLEWV |
| | S | YIYY | GFYG | (SEQ | NO: 76) | 183) | SYISSSSSYIYYADSVKGRFTISR |
| | (SEQ | A | MDVW | ID NO: | | | DNSKNTLYLQMNSLRAEDTAVYYC |
| | ID | (SEQ | (SEQ | 182) | | | AREIAAAGFYGMDVWGQGTTVTVS |
| | NO: | ID | ID | | | | SGGGGSGGGGSGGGGSGGGGSDIQ |
| | 278) | NO: | NO: | | | | MTQSPSSLSASVGDRVTITCRASQ |
| | | 279) | 280) | | | | SISSYLNWYQQKPGKAPKLLIYAA |
| | | | | | | | SSLQSGVPSRFSGSGSGTDFTLTI |
| | | | | | | | SSLQPEDFATYYCQQSYSTPLTFG |
| | | | | | | | GGTKVEIK (SEQ ID NO: |
| | | | | | | | 281) |
| 42. | GTLS | GGII | CARD | RASQSV | GASTRAT | CQQYGSSPITF | QVQLVQSGAEVKKPGSSVKVSCKA |
| | RYGV | PIFG | RVYY | SSSYLA | (SEQ ID | (SEQ ID NO: | SGGTLSRYGVSWVRQAPGQGLEWM |
| | S | TTNY | DSSG | (SEQ | NO: | 286) | GGIIPIFGTTNYAQKFQGRVTITA |
| | (SEQ | A | YPTW | ID NO: | 252) | | DESTSTAYMELSSLRSEDTAVYYC |
| | ID | (SEQ | YFDL | 285) | | | ARDRVYYDSSGYPTWYFDLWGRGT |
| | NO: | ID | W | | | | LVTVSSGGGGSGGGGSGGGGSGGG |
| | 282) | NO: | (SEQ | | | | GSEIVMTQSPATLSVSPGERATLS |
| | | 283) | ID | | | | CRASQSVSSSYLAWYQQKPGQAPR |
| | | | NO: | | | | LLIYGASTRATGIPARFSGSGSGT |
| | | | 284) | | | | EFTLTISSLQSEDFAVYYCQQYGS |
| | | | | | | | SPITFGQGTKVEIK (SEQ ID |
| | | | | | | | NO: 287) |
| 43. | FTFD | SGIS | CARD | QASQDI | KASTLES | CQQANSFPLTF | EVQLLESGGGLVQPGGSLRLSCAA |
| | DFAM | GNGD | ASYG | RNYLN | (SEQ ID | (SEQ ID NO: | SGFTFDDFAMHWVRQAPGKGLEWV |
| | H | SRYY | GNYG | (SEQ | NO: | 177) | SGISGNGDSRYYADSVKGRFTISR |
| | (SEQ | A | MDVW | ID NO: | 149) | | DNSKNTLYLQMNSLRAEDTAVYYC |
| | ID | (SEQ | (SEQ | 291) | | | ARDASYGGNYGMDVWGQGTTVTVS |
| | NO: | ID | ID | | | | SGGGGSGGGGSGGGGSGGGGSDIQ |
| | 288) | NO: | NO: | | | | MTQSPSSLSASVGDRVTITCQASQ |
| | | 289) | 290) | | | | DIRNYLNWYQQKPGKAPKLLIYKA |
| | | | | | | | STLESGVPSRFSGSGSGTDFTLTI |
| | | | | | | | SSLQPEDFATYYCQQANSFPLTFG |
| | | | | | | | PGTKVDIK (SEQ ID NO: |
| | | | | | | | 292) |
| 44 . | FTFS | SAIG | CARE | RASQSI | GASNLQS | CQQSYSTPWTF | EVQLVESGGGLVKPGGSLRLSCAA |
| | SYWM | TGGG | WLVP | SRWLA | (SEQ ID | (SEQ ID NO: | SGFTFSSYWMSWVRQAPGKGLEWV |
| | S | TYYA | YYGM | (SEQ | NO: | 124) | SAIGTGGGTYYAAPVKGRFTISRD |
| | (SEQ | (SEQ | DVW | ID NO: | 295) | | DSKNTLYLQMNSLKTEDTAVYYCA |
| | ID | ID | (SEQ | 294) | | | REWLVPYYGMDVWGQGTTVTVSSG |
| | NO: | NO: | ID | | | | GGGSGGGGSGGGGSGGGGSDIQMT |
| | 179) | 262) | NO: | | | | QSPSSLSASVGDRVTITCRASQSI |
| | | | 293) | | | | SRWLAWYQQKPGKAPKLLIYGASN |
| | | | | | | | LQSGVPSRFSGSGSGTDFTLTISS |
| | | | | | | | LQPEDFATYYCQQSYSTPWTFGQG |
| | | | | | | | TKVEIK (SEQ ID NO: 296) |
| 45. | FSVS | AGIS | CARS | KSSQSV | WASTRQS | CHQYYGHPPTF | EVQLLESGGGLVQPGGSLRLSCAA |
| | SNYM | YDGS | RGIA | LYSSNN | (SEQ ID | (SEQ ID NO: | SGFSVSSNYMSWVRQAPGKGLEWV |
| | S | SKPY | ARPL | KNYLA | NO: | 302) | AGISYDGSSKPYADSVKGRFTISR |
| | (SEQ | A | QHW | (SEQ | 301) | | DNSKNTLYLQMNSLRAEDTAVYYC |
| | ID | (SEQ | (SEQ | ID NO: | | | ARSRGIAARPLQHWGQGTLVTVSS |
| | NO: | ID | ID | 300) | | | GGGGSGGGGSGGGGSGGGGSDIVM |
| | 297) | NO: | NO: | | | | TQSPDSLAVSLGERATINCKSSQS |
| | | 298) | 299) | | | | VLYSSNNKNYLAWYQQKPGQPPKL |
| | | | | | | | LIYWASTRQSGVPDRFSGSGSGTD |
| | | | | | | | FTLTISSLQAEDVAVYYCHQYYGH |
| | | | | | | | PPTFGGGTKVEIK (SEQ ID |
| | | | | | | | NO: 303) |
| 46. | FSVS | AGIS | CARS | KSSQSV | QASTRQS | CHQYYGHPPTF | EVQLLESGGGLVQPGGSLRLSCAA |
| | SNYM | YDGS | RGIA | LYSSNN | (SEQ ID | (SEQ ID NO: | SGFSVSSNYMSWVRQAPGKGLEWV |
| | S | SKPY | ARPL | KNYLA | NO: | 302) | AGISYDGSSKPYADSVKGRFTISR |
| | (SEQ | A | QHW | (SEQ | 304) | | DNSKNTLYLQMNSLRAEDTAVYYC |
| | ID | (SEQ | (SEQ | ID NO: | | | ARSRGIAARPLQHWGQGTLVTVSS |
| | NO: | ID | ID | 300) | | | GGGGSGGGGSGGGGSGGGGSDIVM |
| | 297) | NO: | NO: | | | | TQSPDSLAVSLGERATINCKSSQS |
| | | 298) | 299) | | | | VLYSSNNKNYLAWYQQKPGQPPKL |
| | | | | | | | LIYQASTRQSGVPDRFSGSGSGTD |
| | | | | | | | FTLTISSLQAEDVAVYYCHQYYGH |
| | | | | | | | PPTFGGGTKVEIK (SEQ ID |
| | | | | | | | NO: 305) |
| 47. | FSFS | SAIS | CARD | RASQGI | DASNLET | CQQSYSTPLTF | EVQLLESGGGLVQPGGSLRLSCAA |
| | DYGM | GSGG | GGWQ | SNNLN | (SEQ ID | (SEQ ID NO: | SGFSFSDYGMHWVRQAPGKGLEWV |
| | H | STYY | PAAI | (SEQ | NO: | 183) | SAISGSGGSTYYADSVKGRFTISR |
| | (SEQ | A | LDYW | ID NO: | 169) | | DNSKNTLYLQMNSLRAEDTAVYYC |
| | ID | (SEQ | (SEQ | 115) | | | ARDGGWQPAAILDYWGQGTLVTVS |
| | NO: | ID | ID | | | | SGGGGSGGGGSGGGGSGGGGSDIQ |
| | 306) | NO: | NO: | | | | MTQSPSSLSASVGDRVTITCRASQ |
| | | 113) | 307) | | | | GISNNLNWYQQKPGKAPKLLIYDA |
| | | | | | | | SNLETGVPSRFSGSGSGTDFTLTI |
| | | | | | | | SSLQPEDFATYYCQQSYSTPLTFG |
| | | | | | | | GGTKVEIK (SEQ ID NO: |
| | | | | | | | 308) |
| 48. | FTFS | SVIY | CARD | RASQGI | DASNLET | CQQSYSTCYTF | EVQLLESGGGLVQPGGSLRLSCAA |
| | DHGM | GGES | PAVA | SNYLA | (SEQ ID | (SEQ ID NO: | SGFTFSDHGMHWVRQAPGKGLEWV |
| | H | TYYA | GGGI | (SEQ | NO: | 312) | SVIYGGESTYYADSVKGRFTISRD |
| | (SEQ | (SEQ | FDYW | ID NO: | 169) | | NSKNTLYLQMNSLRAEDTAVYYCA |
| | ID | ID | (SEQ | 228) | | | RDPAVAGGGIFDYWGQGTLVTVSS |
| | NO: | NO: | ID | | | | GGGGSGGGGSGGGGSGGGGSDIQM |
| | 309) | 310) | NO: | | | | TQSPSSLSASVGDRVTITCRASQG |
| | | | 311) | | | | ISNYLAWYQQKPGKAPKLLIYDAS |
| | | | | | | | NLETGVPSRFSGSGSGTDFTLTIS |
| | | | | | | | SLQPEDFATYYCQQSYSTCYTFGQ |
| | | | | | | | GTKLEIK (SEQ ID NO: 313) |
| 49. | DTFT | GWIN | CARS | RASQTI | DASTLQS | CQQYSSYPLTF | QVQLVQSGAEVKKPGASVKVSCKA |
| | GYYI | PNSG | GLWL | SIWLA | (SEQ ID | (SEQ ID NO: | SGDTFTGYYIHWVRQAPGQGLEWM |
| | H | GTNY | GSYY | (SEQ | NO: | 319) | GWINPNSGGTNYAQKFQGRVTMTR |
| | (SEQ | A | GMDV | ID NO: | 318) | | DTSTSTVYMELSSLRSEDTAVYYC |
| | ID | (SEQ | W | 317) | | | ARSGLWLGSYYGMDVWGQGTLVTV |
| | NO: | ID | (SEQ | | | | SSGGGGSGGGGSGGGGSGGGGSDI |
| | 314) | NO: | ID | | | | QMTQSPSSLSASVGDRVTITCRAS |
| | | 315) | NO: | | | | QTISIWLAWYQQKPGKAPKLLIYD |
| | | | 316) | | | | ASTLQSGVPSRFSGSGSGTDFTLT |
| | | | | | | | ISSLQPEDFATYYCQQYSSYPLTF |
| | | | | | | | GQGTKVEIK (SEQ ID NO: |
| | | | | | | | 320) |
| 50. | YTFT | GWIN | CARS | RASHFI | AASTLQS | CQQSYSGISF | QVQLVQSGAEVKKPGASVKVSCKA |
| | SYDI | PNSG | PYYY | SRWVA | (SEQ ID | (SEQ ID NO: | SGYTFTSYDINWVRQAPGQGLEWM |
| | N | TTGY | YGMD | (SEQ | NO: | 325) | GWINPNSGTTGYAQKFQGRVTMTR |
| | (SEQ | A | VW | ID NO: | 123) | | DTSTSTVYMELSSLRSEDTAVYYC |
| | ID | (SEQ | (SEQ | 324) | | | ARSPYYYYGMDVWGQGTTVTVSSG |
| | NO: | ID | ID | | | | GGGSGGGGSGGGGSGGGGSDIQMT |
| | 321) | NO: | NO: | | | | QSPSSLSASVGDRVTITCRASHFI |
| | | 322) | 323) | | | | SRWVAWYQQKPGKAPKLLIYAAST |
| | | | | | | | LQSGVPSRFSGSGSGTDFTLTISS |
| | | | | | | | LQPEDFATYYCQQSYSGISFGPGT |
| | | | | | | | KVDIK (SEQ ID NO: 326) |
| 51. | FTFN | SRIN | CARG | RASQSV | ATSSRAS | CQQYYSGLTF | EVQLLESGGGLVQPGGSLRLSCAA |
| | NYGM | SDGS | AYYY | SGSYLA | (SEQ ID | (SEQ ID NO: | SGFTFNNYGMNWVRQAPGKGLEWV |
| | N | STSY | YYMD | (SEQ | NO: | 332) | SRINSDGSSTSYADSVKGRFTISR |
| | (SEQ | A | VW | ID NO: | 331) | | DNSKNTLYLQMNSLRAEDTAVYYC |
| | ID | (SEQ | (SEQ | 330) | | | ARGAYYYYYMDVWGQGTLVTVSSG |
| | NO: | ID | ID | | | | GGGSGGGGSGGGGSGGGGSEIVMT |
| | 327) | NO: | NO: | | | | QSPATLSVSPGERATLSCRASQSV |
| | | 328) | 329) | | | | SGSYLAWYQQKPGQAPRLLIYATS |
| | | | | | | | SRASGIPARFSGSGSGTEFTLTIS |
| | | | | | | | SLQSEDFAVYYCQQYYSGLTFGQG |
| | | | | | | | TKVEIK (SEQ ID NO: 333) |
| 52. | FTFS | AHIW | CARD | RASQDI | DASSLET | CQQATSLPLTF | EVQLLESGGGLVQPGGSLRLSCAA |
| | NSDM | NDGS | RTDP | RNYLG | (SEQ ID | (SEQ ID NO: | SGFTFSNSDMNWVRQAPGKGLEWV |
| | N | QKYY | GYSS | (SEQ | NO: | 339) | AHIWNDGSQKYYADSVKGRFTISR |
| | (SEQ | A | AMDV | ID NO: | 338) | | DNSKNTLYLQMNSLRAEDTAVYYC |
| | ID | (SEQ | W | 337) | | | ARDRTDPGYSSAMDVWGQGTTVTV |
| | NO: | ID | (SEQ | | | | SSGGGGSGGGGSGGGGSGGGGSDI |
| | 334) | NO: | ID | | | | QMTQSPSSLSASVGDRVTITCRAS |
| | | 335) | NO: | | | | QDIRNYLGWYQQKPGKAPKLLIYD |
| | | | 336) | | | | ASSLETGVPSRFSGSGSGTDFTLT |
| | | | | | | | ISSLQPEDFATYYCQQATSLPLTF |
| | | | | | | | GGGTKVEIK (SEQ ID NO: |
| | | | | | | | 340) |
| 53. | YTFT | GWMN | CAKD | RASQDI | QASSLES | CQQSYTIPLTF | QVQLVQSGAEVKKPGASVKVSCKA |
| | SYDI | PNSG | SDYS | TNDLG | (SEQ ID | (SEQ ID NO: | SGYTFTSYDINWVRQAPGQGLEWM |
| | N | NTGY | NLLW | (SEQ | NO: | 344) | GWMNPNSGNTGYAQKFQGRVTMTR |
| | (SEQ | A | DYW | ID NO: | 343) | | DTSTSTVYMELSSLRSEDTAVYYC |
| | ID | (SEQ | (SEQ | 342) | | | AKDSDYSNLLWDYWGQGTLVTVSS |
| | NO: | ID | ID | | | | GGGGSGGGGSGGGGSGGGGSDIQM |
| | 321) | NO: | NO: | | | | TQSPSSLSASVGDRVTITCRASQD |
| | | 215) | 341) | | | | ITNDLGWYQQKPGKAPKLLIYQAS |
| | | | | | | | SLESGVPSRFSGSGSGTDFTLTIS |
| | | | | | | | SLQPEDFATYYCQQSYTIPLTFGQ |
| | | | | | | | GTKVEIK (SEQ ID NO: 345) |
| 54. | FTFG | AWS | CAKD | RASQNI | DASNLET | CQQANSFPPTF | EVQLLESGGGLVQPGGSLRLSCAA |
| | DYAM | YDGT | ICSS | NNYVN | (SEQ ID | (SEQ ID NO: | SGFTFGDYAMSWVRQAPGKGLEWV |
| | S | NKYY | TSCY | (SEQ | NO: | 349) | AVVSYDGTNKYYADSVKGRFTISR |
| | (SEQ | A | FDLW | ID NO: | 169) | | DNSKNTLYLQMNSLRAEDTAVYYC |
| | ID | (SEQ | (SEQ | 348) | | | AKDICSSTSCYFDLWGRGTLVTVS |
| | NO: | ID | ID | | | | SGGGGSGGGGSGGGGSGGGGSDIQ |
| | 244) | NO: | NO: | | | | MTQSPSSLSASVGDRVTITCRASQ |
| | | 346) | 347) | | | | NINNYVNWYQQKPGKAPKLLIYDA |
| | | | | | | | SNLETGVPSRFSGSGSGTDFTLTI |
| | | | | | | | SSLQPEDFATYYCQQANSFPPTFG |
| | | | | | | | QGTRLEIK (SEQ ID NO: |
| | | | | | | | 350) |
| 55. | YTFT | GIID | CARE | RASQGI | ATSSLQT | CQQTYSIPITF | QVQLVQSGAEVKKPGASVKVSCKA |
| | SYYM | PSGG | EWSS | SSYLA | (SEQ ID | (SEQ ID NO: | SGYTFTSYYMHWVRQAPGQGLEWM |
| | H | STSY | GGVG | (SEQ | NO: | 355) | GIIDPSGGSTSYAQKFQGRVTMTR |
| | (SEQ | A | YFDY | ID NO: | 354) | | DTSTSTVYMELSSLRSEDTAVYYC |
| | ID | (SEQ | W | 353) | | | AREEWSSGGVGYFDYWGQGTLVTV |
| | NO: | ID | (SEQ | | | | SSGGGGSGGGGSGGGGSGGGGSDI |
| | 225) | NO: | ID | | | | QMTQSPSSLSASVGDRVTITCRAS |
| | | 351) | NO: | | | | QGISSYLAWYQQKPGKAPKLLIYA |
| | | | 352) | | | | TSSLQTGVPSRFSGSGSGTDFTLT |
| | | | | | | | ISSLQPEDFATYYCQQTYSIPITF |
| | | | | | | | GQGTRLEIK (SEQ ID NO: |
| | | | | | | | 356) |
| 56. | FTFD | SAIS | CARD | QASQDI | KASSLES | CQQANSYPVTF | EVQLLESGGGLVQPGGSLRLSCAA |
| | DYAM | GGGE | ASYG | RNYLN | (SEQ ID | (SEQ ID NO: | SGFTFDDYAMHWVRQAPGKGLEWV |
| | H | DTYY | GNYG | (SEQ | NO: | 359) | SAISGGGEDTYYADSVKGRFTISR |
| | (SEQ | A | MDVW | ID NO: | 358) | | DNSKNTLYLQMNSLRAEDTAVYYC |
| | ID | (SEQ | (SEQ | 291) | | | ARDASYGGNYGMDVWGQGTTVTVS |
| | NO: | ID | ID | | | | SGGGGSGGGGSGGGGSGGGGSDIQ |
| | 145) | NO: | NO: | | | | MTQSPSSLSASVGDRVTITCQASQ |
| | | 357) | 290) | | | | DIRNYLNWYQQKPGKAPKLLIYKA |
| | | | | | | | SSLESGVPSRFSGSGSGTDFTLTI |
| | | | | | | | SSLQPEDFATYYCQQANSYPVTFG |
| | | | | | | | GGTKVEIK (SEQ ID NO: |
| | | | | | | | 360) |
| 57. | YTFT | GUN | CARD | RASQGI | AASSLQG | CQQSYSLPYTF | QVQLVQSGAEVKKPGASVKVSCKA |
| | SYYM | PSGG | SVAG | SNYFA | (SEQ ID | (SEQ ID NO: | SGYTFTSYYMHWVRQAPGQGLEWM |
| | H | STSY | TGGR | (SEQ | NO: | 364) | GIINPSGGSTSYAQKFQGRVTMTR |
| | (SEQ | A | YYGM | ID NO: | 363) | | DTSTSTVYMELSSLRSEDTAVYYC |
| | ID | (SEQ | DVW | 362) | | | ARDSVAGTGGRYYGMDVWGQGTLV |
| | NO: | ID | (SEQ | | | | TVSSGGGGSGGGGSGGGGSGGGGS |
| | 225) | NO: | ID | | | | DIQMTQSPSSLSASVGDRVTITCR |
| | | 80) | NO: | | | | ASQGISNYFAWYQQKPGKAPKLLI |
| | | | 361) | | | | YAASSLQGGVPSRFSGSGSGTDFT |
| | | | | | | | LTISSLQPEDFATYYCQQSYSLPY |
| | | | | | | | TFGQGTKLEIK (SEQ ID NO: |
| | | | | | | | 365) |
| 58. | YTFT | GUN | CTTA | RASQGI | AASSLQS | CQQYYSNADF | QVQLVQSGAEVKKPGASVKVSCKA |
| | GYYM | PSGG | DYYY | SNYLA | (SEQ ID | (SEQ ID NO: | SGYTFTGYYMHWVRQAPGQGLEWM |
| | H | NTKY | YMDV | (SEQ | NO: 76) | 368) | GIINPSGGNTKYAQKFQGRVTMTR |
| | (SEQ | A | W | ID NO: | | | DTSTSTVYMELSSLRSEDTAVYYC |
| | ID | (SEQ | (SEQ | 228) | | | TTADYYYYMDVWGKGTTVTVSSGG |
| | NO: | ID | ID | | | | GGSGGGGSGGGGSGGGGSDIQMTQ |
| | 138) | NO: | NO: | | | | SPSSLSASVGDRVTITCRASQGIS |
| | | 366) | 367) | | | | NYLAWYQQKPGKAPKLLIYAASSL |
| | | | | | | | QSGVPSRFSGSGSGTDFTLTISSL |
| | | | | | | | QPEDFATYYCQQYYSNADFGQGTK |
| | | | | | | | VEIK (SEQ ID NO: 369) |
| 59. | FTFS | SYIS | CARD | RASQSV | SSLQS | QQYKSYPVT | EVQLLESGGGLVQPGGSLRLSCAA |
| | DFWM | GDSG | RPYY | SRSLA | (SEQ ID | (SEQ ID NO: | SGFTFSDFWMHWVRQAPGKGLEWI |
| | H | YTNY | YYMD | (SEQ | NO: | 374) | SYISGDSGYTNYADSVKGRFTISR |
| | (SEQ | A | VW | ID NO: | 373) | | DNSKNTLYLQMNSLRAEDTAVYYC |
| | ID | (SEQ | (SEQ | 372) | | | ARDRPYYYYMDVWGKGTTVTVSSG |
| | NO: | ID | ID | | | | GGGSGGGGSGGGGSGGGGSDIQMT |
| | 370) | NO: | NO: | | | | QSPSSLSASVGDRVTITCRASQSV |
| | | 180) | 371) | | | | SRSLAWYQQKPGKAPKLLIYAASS |
| | | | | | | | LQSGVPSRFSGSGSGTDFTLTISS |
| | | | | | | | LQPEDFATYYCQQYKSYPVTFGQG |
| | | | | | | | TKVEIK (SEQ ID NO: 375) |
| 60. | FTFD | SDIS | CARD | QASQDI | SYLQS | QQAHNYPIT | EVQLLESGGGLVQPGGSLRLSCAA |
| | DYTM | GSGG | VWA | SNYLN | (SEQ ID | (SEQ ID NO: | SGFTFDDYTMHWVRQAPGKGLEWV |
| | H | STYY | GTPL | (SEQ | NO: | 380) | SDISGSGGSTYYADSVKGRFTISR |
| | (SEQ | A | HFDY | ID NO: | 379) | | DNSKNTLYLQMNSLRAEDTAVYYC |
| | ID | (SEQ | W | 148) | | | AKDVVVAGTPLHFDYWGQGTLVTV |
| | NO: | ID | (SEQ | | | | SSGGGGSGGGGSGGGGSGGGGSDI |
| | 376) | NO: | ID | | | | QMTQSPSSLSASVGDRVTITCQAS |
| | | 377) | NO: | | | | QDISNYLNWYQQKPGKAPKLLIYA |
| | | | 378) | | | | ASYLQSGVPSRFSGSGSGTDFTLT |
| | | | | | | | ISSLQPEDFATYYCQQAHNYPITF |
| | | | | | | | GQGTRLEIK (SEQ ID NO: |
| | | | | | | | 381) |
| 61. | FTFS | ASIS | CARE | RASQSI | SSLQS | QQANAFPPT | EVQLLESGGGLVQPGGSLRLSCAA |
| | NAWM | STSA | WGA | STWLA | (SEQ ID | (SEQ ID NO: | SEFTFSNAWMSWVRQAPGKGLEWV |
| | S | YIDY | TTFD | (SEQ | NO: | 385) | ASISSTSAYIDYADSVKGRFTISR |
| | (SEQ | A | YW | ID NO: | 373) | | DNSKNTLYLQMNSLRAEDTAVYYC |
| | ID | (SEQ | (SEQ | 384) | | | AREVVGATTFDYWGQGTLVTVSSG |
| | NO: | ID | ID | | | | GGGSGGGGSGGGGSGGGGSDIQMT |
| | 193) | NO: | NO: | | | | QSPSSLSASVGDRVTITCRASQSI |
| | | 382) | 383) | | | | STWLAWYQQKPGKAPKLLIYAASS |
| | | | | | | | LQSGVPSRFSGSGSGTDFTLTISS |
| | | | | | | | LQPEDFATYYCQQANAFPPTFGQG |
| | | | | | | | TRLEIK (SEQ ID NO: 386) |
| 62. | GTFS | GWME | CAKG | KSSQSV | STRES | QQYYSTPPT | QVQLVQSGAEVKKPGSSVKVSCKA |
| | SYAI | PHTG | GFSW | LYSSNN | (SEQ ID | (SEQ ID NO: | SGGTFSSYAISWVRQAPGQGLEWM |
| | S | NTRY | FDPW | KNYLA | NO: | 390) | GWMEPHTGNTRYAQKFQGRVTITA |
| | (SEQ | A | (SEQ | (SEQ | 389) | | DESTSTAYMELSSLRSEDTAVYYC |
| | ID | (SEQ | ID | ID NO: | | | AKGGFSWFDPWGQGTLVTVSSGGG |
| | NO: | ID | NO: | 300) | | | GSGGGGSGGGGSGGGGSDIVMTQS |
| | 88) | NO: | 388) | | | | PDSLAVSLGERATINCKSSQSVLY |
| | | 387) | | | | | SSNNKNYLAWYQQKPGQPPKLLIY |
| | | | | | | | WASTRESGVPDRFSGSGSGTDFTL |
| | | | | | | | TISSLQAEDVAVYYCQQYYSTPPT |
| | | | | | | | FGQGTRLEIK (SEQ ID NO: |
| | | | | | | | 391) |
| 63. | FTFD | ASIT | CARE | RASQGI | STRAT | QQYYTYPPT | EVQLLESGGGLVKPGGSLRLSCAA |
| | DYAM | SSSA | RVDW | SNSYLA | (SEQ ID | (SEQ ID NO: | SGFTFDDYAMHWVRQAPGKGLEWV |
| | H | FIDY | NSYF | (SEQ | NO: | 396) | ASITSSSAFIDYAASVKGRFTISR |
| | (SEQ | A | DLW | ID NO: | 395) | | DDSKNTLYLQMNSLKTEDTAVYYC |
| | ID | (SEQ | (SEQ | 394) | | | ARERVDWNSYFDLWGRGTLVTVSS |
| | NO: | ID | ID | | | | GGGGSGGGGSGGGGSGGGGSEIVM |
| | 145) | NO: | NO: | | | | TQSPATLSVSPGERATLSCRASQG |
| | | 392) | 393) | | | | ISNSYLAWYQQKPGQAPRLLIYGA |
| | | | | | | | STRATGIPARFSGSGSGTEFTLTI |
| | | | | | | | SSLQSEDFAVYYCQQYYTYPPTFG |
| | | | | | | | PGTKVDIK (SEQ ID NO: |
| | | | | | | | 397) |
| 64. | FAFS | AGTS | CARE | RASQGI | ANLEG | QQSDIFPPT | EVQLLESGGGLVKPGGSLRLSCAA |
| | SHWM | GSGE | TYYY | SNYLA | (SEQ ID | (SEQ ID NO: | SGFAFSSHWMHWVRQAPGKGLEWV |
| | H | SRDY | YYMD | (SEQ | NO: | 402) | AGTSGSGESRDYADFVKGRFTISR |
| | (SEQ | A | VW | ID NO: | 401) | | DDSKNTLYLQMNSLKTEDTAVYYC |
| | ID | (SEQ | (SEQ | 228) | | | ARETYYYYYMDVWGKGTTVTVSSG |
| | NO: | ID | ID | | | | GGGSGGGGSGGGGSGGGGSDIQMT |
| | 398) | NO: | NO: | | | | QSPSSLSASVGDRVTITCRASQGI |
| | | 399) | 400) | | | | SNYLAWYQQKPGKAPKLLIYDAAN |
| | | | | | | | LEGGVPSRFSGSGSGTDFTLTISS |
| | | | | | | | LQPEDFATYYCQQSDIFPPTFGQG |
| | | | | | | | TKVEIK (SEQ ID NO: 403) |
| 65. | YTFT | GWIN | CARE | RASQSI | SSLQS | QQSNSFPLT | QVQLVQSGAEVKKPGASVKVSCKA |
| | RHWI | VKTG | SSGW | SNYLA | (SEQ ID | (SEQ ID NO: | SGYTFTRHWIHWVRQAPGQGLEWM |
| | H | GAGY | YGTD | (SEQ | NO: | 408) | GWINVKTGGAGYAQKFQGRVTMTR |
| | (SEQ | A | VW | ID NO: | 373) | | DTSTSTVYMELSSLRSEDTAVYYC |
| | ID | (SEQ | (SEQ | 407) | | | ARESSGWYGTDVWGQGTTVTVSSG |
| | NO: | ID | ID | | | | GGGSGGGGSGGGGSGGGGSDIQMT |
| | 404) | NO: | NO: | | | | QSPSSLSASVGDRATITCRASQSI |
| | | 405) | 406) | | | | SNYLAWYQQKPGKAPKLLIYAASS |
| | | | | | | | LQSGVPSRFSGSGSGTDFTLTISS |
| | | | | | | | LQPEDFATYYCQQSNSFPLTFGGG |
| | | | | | | | TKVEIK (SEQ ID NO: 409) |
| 66. | FTPS | AAIS | CARE | QASQDI | NLRS | QQANSFPVT | EVQLLESGGGLVQPGGSLRLSCAA |
| | SYWM | YDGK | NKQW | SNFVN | (SEQ ID | (SEQ ID NO: | SGFTFSSYWMHWVRQAPGKGLEWV |
| | H | YKDY | LASF | (SEQ | NO: | 414) | AAISYDGKYKDYEDSVKGRFTISR |
| | (SEQ | E | DYW | ID NO: | 413) | | DNSKNTLYLQMNSLRAEDTAVYYC |
| | ID | (SEQ | (SEQ | 412) | | | ARENKQWLASFDYWGQGTLVTVSS |
| | NO: | ID | ID | | | | GGGGSGGGGSGGGGSGGGGSDIQM |
| | 93) | NO: | NO: | | | | TQSPSSLSASVGDRVTITCQASQD |
| | | 410) | 411) | | | | ISNFVNWYQQKPGKAPKLLIYAAN |
| | | | | | | | LRSGVPSRFSGSGSGTDFTLTISS |
| | | | | | | | LQPEDFATYYCQQANSFPVTFGPG |
| | | | | | | | TKVDIK (SEQ ID NO: 415) |

[0430] The antibodies, can be in a scFv format, which are also illustrated in a non-limiting embodiment in MAdCAM Antibody Table 1.

[0431] In some embodiments, the MAdCAM antibody is selected from the following table, which can be in a IgG format as illustrated in MAdCAM Antibody Table 2.

MAdCAM Antibody Table 2

| Clone | | | | | | | | |
|---|---|---|---|---|---|---|---|---|
| ID | CDR1 | CDR2 | CDR3 | LCDR1 | LCDR2 | LCDR3 | VH | VK |
| 1. | FTFSSY | AVISDD | CTTSKYYY | QASQDI | AASSL | CQQGYS | EVQLLESGGGLVQPGG | DIQMTQSPSSLSASV |
| | GMH | GSDKYY | YYGMDVW | SKSLN | QS | TPLTF | SLRLSCAASGFTFSSY | GDRVTITCQASQDIS |
| | (SEQ | A (SEQ | (SEQ ID | (SEQ | (SEQ | (SEQ | GMHWVRQAPGKGLEWV | KSLNWYQQKPGKAPK |
| | ID NO: | ID NO: | NO: 74) | ID NO: | ID | ID NO: | AVISDDGSDKYYADSV | LLIYAASSLQSGVPS |
| | 72) | 73) | | 75) | NO: | 77) | KGRFTISRDNSKNTLY | RFSGSGSGTDFTLTI |
| | | | | | 76) | | LQMNSLRAEDTAVYYC | SSLQPEDFATYYCQQ |
| | | | | | | | TTSKYYYYYGMDVWGQ | GYSTPLTFGGGTKVE |
| | | | | | | | GTTVTVSS (SEQ ID | IK (SEQ ID NO: |
| | | | | | | | NO: 416) | 417) |
| 2. | YPFIGY | GIINPS | CAREGRLS | RASQSI | GASTL | CQQTWG | QVQLVQSGAEVKKPGA | DIQMTQSPSSLSASV |
| | YLH | GGSTSY | YGMDAW | SSYLA | ES | PPFTF | SVKVSCKASGYPFIGY | GDRVTITCRASQSIS |
| | (SEQ | A (SEQ | (SEQ ID | (SEQ | (SEQ | (SEQ | YLHWVRQAPGQGLEWM | SYLAWYQQKPGKAPK |
| | ID NO: | ID NO: | NO: 81) | ID NO: | ID | ID NO: | GIINPSGGSTSYAQKF | LLIYGASTLESGVPS |
| | 79) | 80) | | 82) | NO: | 84) | QGRVTMTRDTSTSTVY | RFSGSGSGTDFTLTI |
| | | | | | 83) | | MELSSLRSEDTAVYYC | SSLQPEDFATYYCQQ |
| | | | | | | | AREGRLSYGMDAWGQG | TWGPPFTFGQGTKLE |
| | | | | | | | TLVTVSS (SEQ ID | IK (SEQ ID NO: |
| | | | | | | | NO: 418) | 419) |
| 3. | YPFIGQ | GIINPS | CAREGRLS | RASQSI | GASTL | CQQTWG | QVQLVQSGAEVKKPGA | DIQMTQSPSSLSASV |
| | YLH | GGSTSY | YGMDAW | SSYLA | ES | PPFTF | SVKVSCKASGYPFIGQ | GDRVTITCRASQSIS |
| | (SEQ | A (SEQ | (SEQ ID | (SEQ | (SEQ | (SEQ | YLHWVRQAPGQGLEWM | SYLAWYQQKPGKAPK |
| | ID NO: | ID NO: | NO: 81) | ID NO: | ID | ID NO: | GIINPSGGSTSYAQKF | LLIYGASTLESGVPS |
| | 86) | 80) | | 82) | NO: | 84) | QGRVTMTRDTSTSTVY | RFSGSGSGTDFTLTI |
| | | | | | 83) | | MELSSLRSEDTAVYYC | SSLQPEDFATYYCQQ |
| | | | | | | | AREGRLSYGMDAWGQG | TWGPPFTFGQGTKLE |
| | | | | | | | TLVTVSS (SEQ ID | IK (SEQ ID NO: |
| | | | | | | | NO: 420) | 419) |
| 4. | GTFSSY | GSINPS | CAKDKAQW | QASQDI | AASSL | CQQSYS | QVQLVQSGAEVKKPGA | DIQMTQSPSSLSASV |
| | AIS | GDTTSY | LVGYFDYW | SNSLN | QS | SVITF | SVKVSCKASGGTFSSY | GDRVTITCQASQDIS |
| | (SEQ | A (SEQ | (SEQ ID | (SEQ | (SEQ | (SEQ | AISWVRQAPGQGLEWM | NSLNWYQQKPGKAPK |
| | ID NO: | ID NO: | NO: 90) | ID NO: | ID | ID NO: | GSINPSGDTTSYAQKF | LLIYAASSLQSGVPS |
| | 88) | 89) | | 91) | NO: | 92) | QGRVTMTRDTSTSTVY | RFSGSGSGTDFTLTI |
| | | | | | 76) | | MELSSLRSEDTAVYYC | SSLQPEDFATYYCQQ |
| | | | | | | | AKDKAQWLVGYFDYWG | SYSSVITFGQGTKVE |
| | | | | | | | QGTLVTVSS (SEQ | IK (SEQ ID NO: |
| | | | | | | | ID NO: 421) | 422) |
| 5. | FTFSSY | SSISPG | CAREVQLS | RASQGI | GASSL | CQQANS | EVQLLESGGGLVQPGG | DIQMTQSPSSLSASV |
| | WMH | GSNIDY | HYDYW | SNSLA | QS | FPFTF | SLRLSCAASGFTFSSY | GDRVTITCRASQGIS |
| | (SEQ | A (SEQ | (SEQ ID | (SEQ | (SEQ | (SEQ | WMHWVRQAPGKGLEWV | NSLAWYQQKPGKAPK |
| | ID NO: | ID NO: | NO: 95) | ID NO: | ID | ID NO: | SSISPGGSNIDYADSV | LLIYGASSLQSGVPS |
| | 93) | 94) | | 96) | NO: | 98) | KGRFTISRDNSKNTLY | RFSGSGSGTDFTLTI |
| | | | | | 97) | | LQMNSLRAEDTAVYYC | SSLQPEDFATYYCQQ |
| | | | | | | | AREVQLSHYDYWGQGT | ANSFPFTFGQGTKVE |
| | | | | | | | LVTVSS (SEQ ID | IK (SEQ ID NO: |
| | | | | | | | NO: 423) | 424) |
| 6. | FTFNNY | SRINSY | CAREGPVA | RASQII | GASSL | CQQSYR | EVQLLESGGGLVQPGG | DIQMTQSPSSLSASV |
| | AFH | GTSTTY | GYWYFDLW | GTNLA | QS | LPFTF | SLRLSCAASGFTFNNY | GDRVTITCRASQIIG |
| | (SEQ | A (SEQ | (SEQ ID | (SEQ | (SEQ | (SEQ | AFHWVRQAPGKGLEWV | TNLAWYQQKPGKAPK |
| | ID NO: | ID NO: | NO: 102) | ID NO: | ID | ID NO: | SRINSYGTSTTYADSV | LLIYGASSLQSGVPS |
| | 100) | 101) | | 103) | NO: | 104) | KGRFTISRDNSKNTLY | RFSGSGSGTDFTLTI |
| | | | | | 97) | | LQMNSLRAEDTAVYYC | SSLQPEDFATYYCQQ |
| | | | | | | | AREGPVAGYWYFDLWG | SYRLPFTFGQGTKVE |
| | | | | | | | QGTLVTVSS (SEQ | IK (SEQ ID NO: |
| | | | | | | | ID NO: 425) | 426) |
| 7. | FTFSDY | AIISHA | CAKPYSSG | RASRGI | STLQS | QQAYSF | EVQLLESGGGLVQPGG | DIQMTQSPSSLSASV |
| | QMS | DGGFKD | WSAVYYFD | TNDLG | (SEQ | PWT | SLRLSCAASGFTFSDY | GDRVTITCRASRGIT |
| | (SEQ | YA | YW (SEQ | (SEQ | ID | (SEQ | QMSWVRQAPGKGLEWV | NDLGWYQQKPGKAPK |
| | ID NO: | (SEQ | ID NO: | ID NO: | NO: | ID NO: | AIISHADGGFKDYADS | LLIYAASTLQSGVPS |
| | 427) | ID NO: | 429) | 430) | 431) | 432) | VKGRFTISRDNSKNTL | RFSGSGSGTDFTLTI |
| | | 428) | | | | | YLQMNSLRAEDTAVYY | SSLQPEDFATYYCQQ |
| | | | | | | | CAKPYSSGWSAVYYFD | AYSFPWTFGQGTKVE |
| | | | | | | | YWGQGTLVTVSS | IK (SEQ ID NO: |
| | | | | | | | (SEQ ID NO: 433) | 434) |
| 8. | YTFTGY | GIINPS | CAKDWSSW | RASQNI | AASSL | CQQSYT | QVQLVQSGAEVKKPGA | DIQMTQSPSSLSASV |
| | HIH | GGSTIY | YLGPFDYW | SSSLN | QS | TPYTF | SVKVSCKASGYTFTGY | GDRVTITCRASQNIS |
| | (SEQ | A (SEQ | (SEQ ID | (SEQ | (SEQ | (SEQ | HIHWVRQAPGQGLEWM | SSLNWYQQKPGKAPK |
| | ID NO: | ID NO: | NO: 108) | ID NO: | ID | ID NO: | GIINPSGGSTIYAQKF | LLIYAASSLQSGVPS |
| | 106) | 107) | | 109) | NO: | 110) | QGRVTMTRDTSTSTVY | RFSGSGSGTDFTLTI |
| | | | | | 76) | | MELSSLRSEDTAVYYC | SSLQPEDFATYYCQQ |
| | | | | | | | AKDWSSWYLGPFDYWG | SYTTPYTFGQGTKVE |
| | | | | | | | QGTLVTVSS (SEQ | IK (SEQ ID NO: |
| | | | | | | | ID NO: 435) | 436) |
| 9. | YTFTSY | GIINHS | CARPYSGW | RASQSI | STLQS | QQSYST | QVQLVQSGAEVKKPGA | DIQMTQSPSSLSASV |
| | YMH | GGSTSY | YFAFDIW | SSSLN | (SEQ | PLT | SVKVSCKASGYTFTSY | GDRVTITCRASQSIS |
| | (SEQ | A (SEQ | (SEQ ID | (SEQ | ID | (SEQ | YMHWVRQAPGQGLEWM | SSLNWYQQKPGKAPK |
| | ID NO: | ID NO: | NO: 438) | ID NO: | NO: | ID NO: | GIINHSGGSTSYAQKF | LLIYAASTLQSGVPS |
| | 225) | 437) | | 439) | 431) | 440) | QGRVTMTRDTSTSTVY | RFSGSGSGTDFTLTI |
| | | | | | | | MELSSLRSEDTAVYYC | SSLQPEDFATYYCQQ |
| | | | | | | | ARPYSGWYFAFDIWGQ | SYSTPLTFGQGTKVE |
| | | | | | | | GTLVTVSS (SEQ ID | IK (SEQ ID NO: |
| | | | | | | | NO: 441) | 442) |
| 10. | FMFGDY | SAISGS | CAKDLWA | RASQGI | DASSL | CQQTHS | EVQLLESGGGLVQPGG | DIQMTQSPSSLSASV |
| | AMH | GGSTYY | GIWYFDLW | SNNLN | ES | FPSTF | SLRLSCAASGFMFGDY | GDRVTITCRASQGIS |
| | (SEQ | A (SEQ | (SEQ ID | (SEQ | (SEQ | (SEQ | AMHWVRQAPGKGLEWV | NNLNWYQQKPGKAPK |
| | ID NO: | ID NO: | NO: 114) | ID NO: | ID | ID NO: | SAISGSGGSTYYADSV | LLIYDASSLESGVPS |
| | 112) | 113) | | 115) | NO: | 117) | KGRFTISRDNSKNTLY | RFSGSGSGTDFTLTI |
| | | | | | 116) | | LQMNSLRAEDTAVYYC | SSLQPEDFATYYCQQ |
| | | | | | | | AKDLVVAGIWYFDLWG | THSFPSTFGQGTKLE |
| | | | | | | | RGTLVTVSS (SEQ | IK (SEQ ID NO: |
| | | | | | | | ID NO: 443) | 444) |
| 11. | FTFSDY | SVIGES | CAADPVSR | RASQGI | AASTL | CQQSYS | EVQLLESGGGLVQPGG | DIQMTQSPSSLSASV |
| | YMN | GGSTYY | WPKHGGGD | SSSLA | QS | TPWTF | SLRLSCAASGFTFSDY | GDRVTITCRASQGIS |
| | (SEQ | A (SEQ | YW (SEQ | (SEQ | (SEQ | (SEQ | YMNWVRQAPGKGLEWV | SSLAWYQQKPGKAPK |
| | ID NO: | ID NO: | ID NO: | ID NO: | ID | ID NO: | SVIGESGGSTYYADSV | LLIYAASTLQSGVPS |
| | 119) | 120) | 121) | 122) | NO: | 124) | KGRFTISRDNSKNTLY | RFSGSGSGTDFTLTI |
| | | | | | 123) | | LQMNSLRAEDTAVYYC | SSLQPEDFATYYCQQ |
| | | | | | | | AADPVSRWPKHGGGDY | SYSTPWTFGQGTKVE |
| | | | | | | | WGQGTLVTVSS (SEQ | IK (SEQ ID NO: |
| | | | | | | | ID NO: 445) | 446) |
| 12. | YTLTTW | GWINPN | CAKGDLWG | RASDNI | AASSL | CQQGYS | QVQLVQSGAEVKKPGA | DIQMTQSPSSLSASV |
| | YMY | RGATNY | AMDVW | GSWLA | QS | TPPTF | SVKVSCKASGYTLTTW | GDRVTITCRASDNIG |
| | (SEQ | A (SEQ | (SEQ ID | (SEQ | (SEQ | (SEQ | YMYWVRQAPGQGLEWM | SWLAWYQQKPGKAPK |
| | ID NO: | ID NO: | NO: 128) | ID NO: | ID | ID NO: | GWINPNRGATNYAQKF | LLIYAASSLQSGVPS |
| | 126) | 127) | | 129) | NO: | 130) | QGRVTMTRDTSTSTVY | RFSGSGSGTDFTLTI |
| | | | | | 76) | | MELSSLRSEDTAVYYC | SSLQPEDFATYYCQQ |
| | | | | | | | AKGDLWGAMDVWGQGT | GYSTPPTFGQGTKVE |
| | | | | | | | LVTVSS (SEQ ID | IK (SEQ ID NO: |
| | | | | | | | NO: 447) | 448) |
| 13. | YTFTTY | GGFDPE | CARHAVAG | RASESI | AASTL | CQQSYS | QVQLVQSGAEVKKPGA | DIQMTQSPSSLSASV |
| | YMH | DGETIY | AVGAGYYY | SNWLA | QS | VPFTF | SVKVSCKASGYTFTTY | GDRVTITCRASESIS |
| | (SEQ | A (SEQ | YGMDVW | (SEQ | (SEQ | (SEQ | YMHWVRQAPGQGLEWM | NWLAWYQQKPGKAPK |
| | ID NO: | ID NO: | (SEQ ID | ID NO: | ID | ID NO: | GGFDPEDGETIYAQKF | LLIYAASTLQSGVPS |
| | 132) | 133) | NO: 134) | 135) | NO: | 136) | QGRVTMTRDTSTSTVY | RFSGSGSGTDFTLTI |
| | | | | | 123) | | MELSSLRSEDTAVYYC | SSLQPEDFATYYCQQ |
| | | | | | | | ARHAVAGAVGAGYYYY | SYSVPFTFGPGTKVD |
| | | | | | | | GMDVWGQGTMVTVS S | IK (SEQ ID NO: |
| | | | | | | | (SEQ ID NO: 449) | 450) |
| 14. | YTFTNY | GGIIPI | CAKGQFTG | QANQDI | SKLEA | QQSSEI | QVQLVQSGAEVKKPGS | DIQMTQSPSSLSASV |
| | YMH | VDGVKY | NYYYGMDY | SNYLN | (SEQ | PYS | SVKVSCKASGYTFTNY | GDRVTITCQANQDIS |
| | (SEQ | A (SEQ | W (SEQ | (SEQ | ID | (SEQ | YMHWVRQAPGQGLEWM | NYLNWYQQKPGKAPK |
| | ID NO: | ID NO: | ID NO: | ID NO: | NO: | ID NO: | GGIIPIVDGVKYAQKF | LLIYRASKLEAGVPS |
| | 158) | 451) | 452) | 161) | 453) | 454) | QGRVTITADESTSTAY | RFSGSGSGTDFTLTI |
| | | | | | | | MELSSLRSEDTAVYYC | SSLQPEDFATYYCQQ |
| | | | | | | | AKGQFTGNYYYGMDYW | SSEIPYSFGQGTKVE |
| | | | | | | | GQGTLVTVSS (SEQ | IK (SEQ ID NO: |
| | | | | | | | ID NO: 455) | 456) |
| 15. | YTFTGY | GWIGPN | CARDLDHN | RSSQSL | SSSNR | CMQALH | QVQLVQSGAEVKKPGA | DIVMTQSPLSLPVTP |
| | YMH | SGDTNY | WYFDLW | LHSNGY | AP | IPLTF | SVKVSCKASGYTFTGY | GEPASISCRSSQSLL |
| | (SEQ | A (SEQ | (SEQ ID | NYLD | (SEQ | (SEQ | YMHWVRQAPGQGLEWM | HSNGYNYLDWYLQKP |
| | ID NO: | ID NO: | NO: 140) | (SEQ | ID | ID NO: | GWIGPNSGDTNYAQKF | GQSPQLLIYSSSNRA |
| | 138) | 139) | | ID NO: | NO: | 143) | QGRVTMTRDTSTSTVY | PGVPDRFSGSGSGTD |
| | | | | 141) | 142) | | MELSSLRSEDTAVYYC | FTLKISRVEAEDVGV |
| | | | | | | | ARDLDHNWYFDLWGRG | YYCMQALHIPLTFGG |
| | | | | | | | TLVTVSS (SEQ ID | GTKVEIK (SEQ ID |
| | | | | | | | NO: 457) | NO: 458) |
| 16. | FTFDDY | SYIDAS | CAKDQAAA | QASQDI | KASTL | CQQSYS | EVQLLESGGGLVQPGG | DIQMTQSPSSLSASV |
| | AMH | GTTIYY | GYWYFDLW | SNYLN | ES | TPITF | SLRLSCAASGFTFDDY | GDRVTITCQASQDIS |
| | (SEQ | A (SEQ | (SEQ ID | (SEQ | (SEQ | (SEQ | AMHWVRQAPGKGLEWV | NYLNWYQQKPGKAPK |
| | ID NO: | ID NO: | NO: 147) | ID NO: | ID | ID NO: | SYIDASGTTIYYADSV | LLIYKASTLESGVPS |
| | 145) | 146) | | 148) | NO: | 150) | KGRFTISRDNSKNTLY | RFSGSGSGTDFTLTI |
| | | | | | 149) | | LQMNSLRAEDTAVYYC | SSLQPEDFATYYCQQ |
| | | | | | | | AKDQAAAGYWYFDLWG | SYSTPITFGQGTRLE |
| | | | | | | | RGTLVTVSS (SEQ | IK (SEQ ID NO: |
| | | | | | | | ID NO: 459) | 460) |
| 17. | YTFTDY | GGIVPR | CAKDESSG | RSSQSL | SAYNR | CMQALQ | QVQLVQSGAEVKKPGS | DIVMTQSPLSLPVTP |
| | HIH | SGSTTY | WYYFDYW | LHSNGY | AS | TPLTF | SVKVSCKASGYTFTDY | GEPASISCRSSQSLL |
| | (SEQ | A (SEQ | (SEQ ID | NYLD | (SEQ | (SEQ | HIHWVRQAPGQGLEWM | HSNGYNYLDWYLQKP |
| | ID NO: | ID NO: | NO: 154) | (SEQ | ID | ID NO: | GGIVPRSGSTTYAQKF | GQSPQLLIYSAYNRA |
| | 152) | 153) | | ID NO: | NO: | 156) | QGRVTITADESTSTAY | SGVPDRFSGSGSGTD |
| | | | | 141) | 155) | | MELSSLRSEDTAVYYC | FTLKISRVEAEDVGV |
| | | | | | | | AKDESSGWYYFDYWGQ | YYCMQALQTPLTFGQ |
| | | | | | | | GTLVTVSS (SEQ ID | GTKVEIK (SEQ ID |
| | | | | | | | NO: 461) | NO: 462) |
| 18. | YTFTNY | GGIIPI | CAKGRYTV | QANQDI | RASKL | CQQSSE | QVQLVQSGAEVKKPGS | DIQMTQSPSSLSASV |
| | YMH | VDRVKY | NYYYGMDV | SNYLN | EA | IPYSF | SVKVSCKASGYTFTNY | GDRVTITCQANQDIS |
| | (SEQ | A (SEQ | W (SEQ | (SEQ | (SEQ | (SEQ | YMHWVRQAPGQGLEWM | NYLNWYQQKPGKAPK |
| | ID NO: | ID NO: | ID NO: | ID NO: | ID | ID NO: | GGIIPIVDRVKYAQKF | LLIYRASKLEAGVPS |
| | 158) | 159) | 160) | 161) | NO: | 163) | QGRVTITADESTSTAY | RFSGSGSGTDFTLTI |
| | | | | | 162) | | MELSSLRSEDTAVYYC | SSLQPEDFATYYCQQ |
| | | | | | | | AKGRYTVNYYYGMDVW | SSEIPYSFGQGTKLE |
| | | | | | | | GQGTTVTVSS (SEQ | IK (SEQ ID NO: |
| | | | | | | | ID NO: 463) | 464) |
| 19. | FTFEDY | SYLNSD | CAKDYCTN | RASQSI | DASNL | CQQSYT | EVQLLESGGGLVQPGG | DIQMTQSPSSLSASV |
| | AMH | GGSTSY | GVCAFDYW | STYLN | ET | IPITF | SLRLSCAASGFTFEDY | GDRVTITCRASQSIS |
| | (SEQ | A (SEQ | (SEQ ID | (SEQ | (SEQ | (SEQ | AMHWVRQAPGKGLEWV | TYLNWYQQKPGKAPK |
| | ID NO: | ID NO: | NO: 167) | ID NO: | ID | ID NO: | SYLNSDGGSTSYADSV | LLIYDASNLETGVPS |
| | 165) | 166) | | 168) | NO: | 170) | KGRFTISRDNSKNTLY | RFSGSGSGTDFTLTI |
| | | | | | 169) | | LQMNSLRAEDTAVYYC | SSLQPEDFATYYCQQ |
| | | | | | | | AKDYCTNGVCAFDYWG | SYTIPITFGQGTRLE |
| | | | | | | | QGTLVTVSS (SEQ | IK (SEQ ID NO: |
| | | | | | | | ID NO: 465) | 466) |
| 20. | FTFSDS | SAISGS | CVSDIAVA | RASQSI | AASRL | CQQANS | EVQLLESGGGLVQPGG | DIQMTQSPSSLSASV |
| | AMH | GSTIYY | GHWYFDLW | STFLN | EG | FPLTF | SLRLSCAASGFTFSDS | GDRVTITCRASQSIS |
| | (SEQ | A (SEQ | (SEQ ID | (SEQ | (SEQ | (SEQ | AMHWVRQAPGKGLEWV | TFLNWYQQKPGKAPK |
| | ID NO: | ID NO: | NO: 174) | ID NO: | ID | ID NO: | SAISGSGSTIYYADSV | LLIYAASRLEGGVPS |
| | 172) | 173) | | 175) | NO: | 177) | KGRFTISRDNSKNTLY | RFSGSGSGTDFTLTI |
| | | | | | 176) | | LQMNSLRAEDTAVYYC | SSLQPEDFATYYCQQ |
| | | | | | | | VSDIAVAGHWYFDLWG | ANSFPLTFGPGTKVD |
| | | | | | | | RGTLVTVSS (SEQ | IK (SEQ ID NO: |
| | | | | | | | ID NO: 467) | 468) |
| 21. | FTFSSY | SYISGD | CARANSSG | RASQSI | AASSL | CQQSYS | EVQLVESGGGLVKPGG | DIQMTQSPSSLSASV |
| | WMS | SGYTNY | WYDWYFDL | SSYLN | QS | TPLTF | SLRLSCAASGFTFSSY | GDRVTITCRASQSIS |
| | (SEQ | A (SEQ | W (SEQ | (SEQ | (SEQ | (SEQ | WMSWVRQAPGKGLEWV | SYLNWYQQKPGKAPK |
| | ID NO: | ID NO: | ID NO: | ID NO: | ID | ID NO: | SYISGDSGYTNYAAPV | LLIYAASSLQSGVPS |
| | 179) | 180) | 181) | 182) | NO: | 183) | KGRFTISRDDSKNTLY | RFSGSGSGTDFTLTI |
| | | | | | 76) | | LQMNSLKTEDTAVYYC | SSLQPEDFATYYCQQ |
| | | | | | | | ARANSSGWYDWYFDLW | SYSTPLTFGGGTKVE |
| | | | | | | | GRGTLVTVSS (SEQ | IK (SEQ ID NO: |
| | | | | | | | ID NO: 469) | 470) |
| 22. | FTFDDY | SGISWN | CAKDIVAA | QASQDI | DASNL | CQQSYS | EVQLLESGGGLVQPGG | DIQMTQSPSSLSASV |
| | AMH | SGSIGY | GHYYYGMD | SNYLN | ET | TPLTF | SLRLSCAASGFTFDDY | GDRVTITCQASQDIS |
| | (SEQ | A (SEQ | VW (SEQ | (SEQ | (SEQ | (SEQ | AMHWVRQAPGKGLEWV | NYLNWYQQKPGKAPK |
| | ID NO: | ID NO: | ID NO: | ID NO: | ID | ID NO: | SGISWNSGSIGYADSV | LLIYDASNLETGVPS |
| | 145) | 185) | 186) | 148) | NO: | 183) | KGRFTISRDNSKNTLY | RFSGSGSGTDFTLTI |
| | | | | | 169) | | LQMNSLRAEDTAVYYC | SSLQPEDFATYYCQQ |
| | | | | | | | AKDIVAAGHYYYGMDV | SYSTPLTFGGGTKVE |
| | | | | | | | WGQGTTVTVSS (SEQ | IK (SEQ ID NO: |
| | | | | | | | ID NO: 471) | 472) |
| 23. | FTFDDY | SYIDTS | CARDEAAA | QAGQDI | DASNL | CQQTYS | EVQLLESGGGLVQPGG | DIQMTQSPSSLSASV |
| | AMH | SSHLYY | GYYGMDVW | SNYLN | ET | TPITF | SLRLSCAASGFTFDDY | GDRVTITCQAGQDIS |
| | (SEQ | A (SEQ | (SEQ ID | (SEQ | (SEQ | (SEQ | AMHWVRQAPGKGLEWV | NYLNWYQQKPGKAPK |
| | ID NO: | ID NO: | NO: 189) | ID NO: | ID | ID NO: | SYIDTSSSHLYYADSV | LLIYDASNLETGVPS |
| | 145) | 188) | | 190) | NO: | 191) | KGRFTISRDNSKNTLY | RFSGSGSGTDFTLTI |
| | | | | | 169) | | LQMNSLRAEDTAVYYC | SSLQPEDFATYYCQQ |
| | | | | | | | ARDEAAAGYYGMDVWG | TYSTPITFGQGTKLE |
| | | | | | | | QGTTVTVSS (SEQ | IK (SEQ ID NO: |
| | | | | | | | ID NO: 473) | 474) |
| 24. | FTFSSY | SRISSD | CARGTSYC | RASQSI | SNLQS | QQSYSI | EVQLVESGGGLVKPGG | DIQMTQSPSSLSASV |
| | WMS | GRITTY | TGGVCDID | GRNLN | (SEQ | PLT | SLRLSCAASGFTFSSY | GDRVTITCRASQSIG |
| | (SEQ | A (SEQ | YW (SEQ | (SEQ | ID | (SEQ | WMSWVRQAPGKGLEWV | RNLNWYQQKPGKAPK |
| | ID NO: | ID NO: | ID NO: | ID NO: | NO: | ID NO: | SRISSDGRITTYAAPV | LLIYSASNLQSGVPS |
| | 179) | 475) | 476) | 477) | 478) | 479) | KGRFTISRDDSKNTLY | RFSGSGSGTDFTLTI |
| | | | | | | | LQMNSLKTEDTAVYYC | SSLQPEDFATYYCQQ |
| | | | | | | | ARGTSYCTGGVCDIDY | SYSIPLTFGPGTKVD |
| | | | | | | | WGQGTLVTVSS (SEQ | IK (SEQ ID NO: |
| | | | | | | | ID NO: 480) | 481) |
| 25. | FTFSNA | STIVGN | CARDNPLR | RASQDI | AASSL | CQQSYS | EVQLLESGGGLVQPGG | DIQMTQSPSSLSASV |
| | WMS | GGATYY | WQGMDVW | SNYLN | QS | IPPTF | SLRLSCAASGFTFSNA | GDRVTITCRASQDIS |
| | (SEQ | A (SEQ | (SEQ ID | (SEQ | (SEQ | (SEQ | WMSWVRQAPGKGLEWV | NYLNWYQQKPGKAPK |
| | ID NO: | ID NO: | NO: 195) | ID NO: | ID | ID NO: | STIVGNGGATYYADSV | LLIYAASSLQSGVPS |
| | 193) | 194) | | 196) | NO: | 197) | KGRFTISRDNSKNTLY | RFSGSGSGTDFTLTI |
| | | | | | 76) | | LQMNSLRAEDTAVYYC | SSLQPEDFATYYCQQ |
| | | | | | | | ARDNPLRWQGMDVWGQ | SYSIPPTFGPGTKVD |
| | | | | | | | GTLVTVSS (SEQ ID | IK (SEQ ID NO: |
| | | | | | | | NO: 482) | 483) |
| 26. | FTFSSY | SYISSS | CARANSSS | RASQSI | SGLQS | QQSYST | EVQLLESGGGLVQPGG | DIQMTQSPSSLSASV |
| | AMS | STYTNY | WYDWYFDL | SSYLN | (SEQ | PLT | SLRLSCAASGFTFSSY | GDRVTITCRASQSIS |
| | (SEQ | A (SEQ | W (SEQ | (SEQ | ID | (SEQ | AMSWVRQAPGKGLEWV | SYLNWYQQKPGKAPK |
| | ID NO: | ID NO: | ID NO: | ID NO: | NO: | ID NO: | SYISSSSTYTNYADSV | LLIYAASGLQSGVPS |
| | 484) | 200) | 201) | 182) | 485) | 440) | KGRFTISRDNSKNTLY | RFSGSGSGTDFTLTI |
| | | | | | | | LQMNSLRAEDTAVYYC | SSLQPEDFATYYCQQ |
| | | | | | | | ARANSSSWYDWYFDLW | SYSTPLTFGGGTKVE |
| | | | | | | | GQGTLVTVSS (SEQ | IK (SEQ ID NO: |
| | | | | | | | ID NO: 486) | 487) |
| 27. | FTFSSY | SYISSS | CARANSSS | RASQSI | SGLQS | QQSYST | EVQLLESGGGLVQPGG | DIQMTQSPSSLSASV |
| | QMS | STYTNY | WYDWYFDL | SSYLN | (SEQ | PLT | SLRLSCAASGFTFSSY | GDRVTITCRASQSIS |
| | (SEQ | A (SEQ | W (SEQ | (SEQ | ID | (SEQ | QMSWVRQAPGKGLEWV | SYLNWYQQKPGKAPK |
| | ID NO: | ID NO: | ID NO: | ID NO: | NO: | ID NO: | SYISSSSTYTNYADSV | LLIYAASGLQSGVPS |
| | 199) | 200) | 201) | 182) | 485) | 440) | KGRFTISRDNSKNTLY | RFSGSGSGTDFTLTI |
| | | | | | | | LQMNSLRAEDTAVYYC | SSLQPEDFATYYCQQ |
| | | | | | | | ARANSSSWYDWYFDLW | SYSTPLTFGGGTKVE |
| | | | | | | | GQGTLVTVSS (SEQ | IK (SEQ ID NO: |
| | | | | | | | ID NO: 488) | 487) |
| 28. | FTFSSY | SYISSS | CARANSSS | RASQSI | SSLQS | QQSYST | EVQLLESGGGLVQPGG | DIQMTQSPSSLSASV |
| | AMS | STYTNY | WYDWYFDL | SSYLN | (SEQ | PLT | SLRLSCAASGFTFSSY | GDRVTITCRASQSIS |
| | (SEQ | A (SEQ | W (SEQ | (SEQ | ID | (SEQ | AMSWVRQAPGKGLEWV | SYLNWYQQKPGKAPK |
| | ID NO: | ID NO: | ID NO: | ID NO: | NO: | ID NO: | SYISSSSTYTNYADSV | LLIYAASSLQSGVPS |
| | 484) | 200) | 201) | 182) | 373) | 440) | KGRFTISRDNSKNTLY | RFSGSGSGTDFTLTI |
| | | | | | | | LQMNSLRAEDTAVYYC | SSLQPEDFATYYCQQ |
| | | | | | | | ARANSSSWYDWYFDLW | SYSTPLTFGGGTKVE |
| | | | | | | | GQGTLVTVSS (SEQ | IK (SEQ ID NO: |
| | | | | | | | ID NO: 486) | 470) |
| 29. | FTFSSY | SYISSS | CARANSSS | RASQSI | AASSL | CQQSYS | EVQLLESGGGLVQPGG | DIQMTQSPSSLSASV |
| | QMS | STYTNY | WYDWYFDL | SSYLN | QS | TPLTF | SLRLSCAASGFTFSSY | GDRVTITCRASQSIS |
| | (SEQ | A (SEQ | W (SEQ | (SEQ | (SEQ | (SEQ | QMSWVRQAPGKGLEWV | SYLNWYQQKPGKAPK |
| | ID NO: | ID NO: | ID NO: | ID NO: | ID | ID NO: | SYISSSSTYTNYADSV | LLIYAASSLQSGVPS |
| | 199) | 200) | 201) | 182) | NO: | 183) | KGRFTISRDNSKNTLY | RFSGSGSGTDFTLTI |
| | | | | | 76) | | LQMNSLRAEDTAVYYC | SSLQPEDFATYYCQQ |
| | | | | | | | ARANSSSWYDWYFDLW | SYSTPLTFGGGTKVE |
| | | | | | | | GQGTLVTVSS (SEQ | IK (SEQ ID NO: |
| | | | | | | | ID NO: 488) | 470) |
| 30. | FTFSSY | SGISGS | CATSQAPV | RASQSI | AASNL | CQQSYS | EVQLLESGGGLVQPGG | DIQMTQSPSSLSASV |
| | AMH | GGSAYY | DYYYYGMD | SSWLA | QR | IPITF | SLRLSCAASGFTFSSY | GDRVTITCRASQSIS |
| | (SEQ | A (SEQ | VW (SEQ | (SEQ | (SEQ | (SEQ | AMHWVRQAPGKGLEWV | SWLAWYQQKPGKAPK |
| | ID NO: | ID NO: | ID NO: | ID NO: | ID | ID NO: | SGISGSGGSAYYADSV | LLIYAASNLQRGVPS |
| | 203) | 204) | 205) | 206) | NO: | 208) | KGRFTISRDNSKNTLY | RFSGSGSGTDFTLTI |
| | | | | | 207) | | LQMNSLRAEDTAVYYC | SSLQPEDFATYYCQQ |
| | | | | | | | ATSQAPVDYYYYGMDV | SYSIPITFGQGTKVE |
| | | | | | | | WGQGTTVTVSS (SEQ | IK (SEQ ID NO: |
| | | | | | | | ID NO: 489) | 490) |
| 31. | FTFSSY | SYISGS | CARVGSSG | RASQSI | AASSL | CQQSYS | EVQLVESGGGLVKPGG | DIQMTQSPSSLSASV |
| | WMS | SSYTNY | WYDWYFDL | SSYLN | QS | TPLTF | SLRLSCAASGFTFSSY | GDRVTITCRASQSIS |
| | (SEQ | A (SEQ | W (SEQ | (SEQ | (SEQ | (SEQ | WMSWVRQAPGKGLEWV | SYLNWYQQKPGKAPK |
| | ID NO: | ID NO: | ID NO: | ID NO: | ID | ID NO: | SYISGSSSYTNYAAPV | LLIYAASSLQSGVPS |
| | 179) | 210) | 211) | 182) | NO: | 183) | KGRFTISRDDSKNTLY | RFSGSGSGTDFTLTI |
| | | | | | 76) | | LQMNSLKTEDTAVYYC | SSLQPEDFATYYCQQ |
| | | | | | | | ARVGSSGWYDWYFDLW | SYSTPLTFGQGTKVE |
| | | | | | | | GRGTLVTVSS (SEQ | IK (SEQ ID NO: |
| | | | | | | | ID NO: 491) | 492) |
| 32. | YTLTTW | GWINPN | CAKGDLWG | RASDNI | AASSL | CQQGYS | QVQLVQSGAEVKKPGA | DIQMTQSPSSLSASV |
| | YMY | RGATNY | AMDVW | GSWLA | QS | TPPTF | SVKVSCKASGYTLTTW | GDRVTITCRASDNIG |
| | (SEQ | A (SEQ | (SEQ ID | (SEQ | (SEQ | (SEQ | YMYWVRQAPGQGLEWM | SWLAWYQQKPGKAPK |
| | ID NO: | ID NO: | NO: 128) | ID NO: | ID | ID NO: | GWINPNRGATNYAQKF | LLIYAASSLQSGVPS |
| | 126) | 127) | | 129) | NO: | 130) | QGRVTMTRDTSTSTVY | RFSGSGSGTDFTLTI |
| | | | | | 76) | | MELSSLRSEDTAVYYC | SSLQPEDFATYYCQQ |
| | | | | | | | AKGDLWGAMDVWGQGT | GYSTPPTFGQGTKVE |
| | | | | | | | LVTVSS (SEQ ID | IK (SEQ ID NO: |
| | | | | | | | NO: 447) | 448) |
| 33. | YTLTTW | GWINPN | CAKGDLWG | RASDNI | AASSL | CQQGYS | QVQLVQSGAEVKKPGA | DIQMTQSPSSLSASV |
| | YMY | RGATNY | AMDVW | GSWLA | QS | TPPTF | SVKVSCKASGYTLTTW | GDRVTITCRASDNIG |
| | (SEQ | A (SEQ | (SEQ ID | (SEQ | (SEQ | (SEQ | YMYWVRQAPGQGLEWM | SWLAWYQQKPGKAPK |
| | ID NO: | ID NO: | NO: 128) | ID NO: | ID | ID NO: | GWINPNRGATNYAQKF | LLIYAASSLQSGVPS |
| | 126) | 127) | | 129) | NO: | 130) | QGRVTMTRDTSTSTVY | RFSGSGSGTDFTLTI |
| | | | | | 76) | | MELSSLRSEDTAVYYC | SSLQPEDFATYYCQQ |
| | | | | | | | AKGDLWGAMDVWGQGT | GYSTPPTFGQGTKVE |
| | | | | | | | TVTVSS (SEQ ID | IK (SEQ ID NO: |
| | | | | | | | NO: 493) | 448) |
| 34. | YTFTGY | GWMNPN | CARDPGFL | RASQSI | AASSL | CQQSYT | QVQLVQSGAEVKKPGA | DIQMTQSPSSLSASV |
| | YIH | SGNTGY | GYCSGGSC | SSYLH | QS | APYTF | SVKVSCKASGYTFTGY | GDRVTITCRASQSIS |
| | (SEQ | A (SEQ | YDGWFDPW | (SEQ | (SEQ | (SEQ | YIHWVRQAPGQGLEWM | SYLHWYQQKPGKAPK |
| | ID NO: | ID NO: | (SEQ ID | ID NO: | ID | ID NO: | GWMNPNSGNTGYAQKF | LLIYAASSLQSGVPS |
| | 214) | 215) | NO: 216) | 217) | NO: | 218) | QGRVTMTRDTSTSTVY | RFSGSGSGTDFTLTI |
| | | | | | 76) | | MELSSLRSEDTAVYYC | SSLQPEDFATYYCQQ |
| | | | | | | | ARDPGFLGYCSGGSCY | SYTAPYTFGQGTKLE |
| | | | | | | | DGWFDPWGQGTLVTVS | IK (SEQ ID NO: |
| | | | | | | | S (SEQ ID NO: | 495) |
| | | | | | | | 494) | |
| 35. | YTFTGY | GWMNPN | CARDPGFL | RASQSI | AASSL | CQQSYT | QVQLVQSGAEVKKPGA | DIQMTQSPSSLSASV |
| | YIH | SGNTGY | GYSSGGSC | SSYLH | QS | APYTF | SVKVSCKASGYTFTGY | GDRVTITCRASQSIS |
| | (SEQ | A (SEQ | YDGWFDPW | (SEQ | (SEQ | (SEQ | YIHWVRQAPGQGLEWM | SYLHWYQQKPGKAPK |
| | ID NO: | ID NO: | (SEQ ID | ID NO: | ID | ID NO: | GWMNPNSGNTGYAQKF | LLIYAASSLQSGVPS |
| | 214) | 215) | NO: 496) | 217) | NO: | 218) | QGRVTMTRDTSTSTVY | RFSGSGSGTDFTLTI |
| | | | | | 76) | | MELSSLRSEDTAVYYC | SSLQPEDFATYYCQQ |
| | | | | | | | ARDPGFLGYSSGGSSY | SYTAPYTFGQGTKLE |
| | | | | | | | DGWFDPWGQGTLVTVS | IK (SEQ ID NO: |
| | | | | | | | S (SEQ ID NO: | 495) |
| | | | | | | | 497) | |
| 36. | FTFDDY | SAISGD | CARDGTVN | QASQDI | SNLET | QQSYSI | EVQLLESGGGLVQPGG | DIQMTQSPSSLSASV |
| | ALH | GRSTTY | GATGWFDP | SKYLN | (SEQ | PFT | SLRLSCAASGFTFDDY | GDRVTITCQASQDIS |
| | (SEQ | A (SEQ | W (SEQ | (SEQ | ID | (SEQ | ALHWVRQAPGKGLEWV | KYLNWYQQKPGKAPK |
| | ID NO: | ID NO: | ID NO: | ID NO: | NO: | ID NO: | SAISGDGRSTTYADSV | LLIYDASNLETGVPS |
| | 498) | 499) | 500) | 501) | 502) | 503) | KGRFTISRDNSKNTLY | RFSGSGSGTDFTLTI |
| | | | | | | | LQMNSLRAEDTAVYYC | SSLQPEDFATYYCQQ |
| | | | | | | | ARDGTVNGATGWFDPW | SYSIPFTFGPGTKVD |
| | | | | | | | GQGTLVTVSS (SEQ | IK (SEQ ID NO: |
| | | | | | | | ID NO: 504) | 505) |
| 37. | FTFSDY | SAISGS | CARDGGWQ | RASQGI | SNLET | QQSYST | EVQLLESGGGLVQPGG | DIQMTQSPSSLSASV |
| | GMP | GGSTYY | PAAILDYW | SNNLN | (SEQ | PLT | SLRLSCAASGFTFSDY | GDRVTITCRASQGIS |
| | (SEQ | A (SEQ | (SEQ ID | (SEQ | ID | (SEQ | GMPWVRQAPGKGLEWV | NNLNWYQQKPGKAPK |
| | ID NO: | ID NO: | NO: 307) | ID NO: | NO: | ID NO: | SAISGSGGSTYYADSV | LLIYDASNLETGVPS |
| | 506) | 113) | | 115) | 502) | 440) | KGRFTISRDNSKNTLY | RFSGSGSGTDFTLTI |
| | | | | | | | LQMNSLRAEDTAVYYC | SSLQPEDFATYYCQQ |
| | | | | | | | ARDGGWQPAAILDYWG | SYSTPLTFGQGTKVE |
| | | | | | | | QGTLVTVSS (SEQ | IK (SEQ ID NO: |
| | | | | | | | ID NO: 507) | 508) |
| 38. | YTFTDY | GWMNPT | CAREGEGS | RASQGI | DASNL | CQQSYS | QVQLVQSGAEVKKPGA | DIQMTQSPSSLSASV |
| | FLH | SGNTGY | GFDYW | NSWLA | ET | TPLTF | SVKVSCKASGYTFTDY | GDRVTITCRASQGIN |
| | (SEQ | A (SEQ | (SEQ ID | (SEQ | (SEQ | (SEQ | FLHWVRQAPGQGLEWM | SWLAWYQQKPGKAPK |
| | ID NO: | ID NO: | NO: 222) | ID NO: | ID | ID NO: | GWMNPTSGNTGYAQKF | LLIYDASNLETGVPS |
| | 220) | 221) | | 223) | NO: | 183) | QGRVTMTRDTSTSTVY | RFSGSGSGTDFTLTI |
| | | | | | 169) | | MELSSLRSEDTAVYYC | SSLQPEDFATYYCQQ |
| | | | | | | | AREGEGSGFDYWGQGT | SYSTPLTFGGGTKVE |
| | | | | | | | LVTVSS (SEQ ID | IK (SEQ ID NO: |
| | | | | | | | NO: 509) | 510) |
| 39. | YTFTSY | AWMNPN | CARDYDFW | RASQGI | AASSL | CQQSYS | QVQLVQSGAEVKKPGA | DIQMTQSPSSLSASV |
| | YMH | SGNTGY | SGSLGYW | SNYLA | QS | TPWTF | SVKVSCKASGYTFTSY | GDRVTITCRASQGIS |
| | (SEQ | A (SEQ | (SEQ ID | (SEQ | (SEQ | (SEQ | YMHWVRQAPGQGLEWM | NYLAWYQQKPGKAPK |
| | ID NO: | ID NO: | NO: 227) | ID NO: | ID | ID NO: | AWMNPNSGNTGYAQKF | LLIYAASSLQSGVPS |
| | 225) | 226) | | 228) | NO: | 124) | QGRVTMTRDTSTSTVY | RFSGSGSGTDFTLTI |
| | | | | | 76) | | MELSSLRSEDTAVYYC | SSLQPEDFATYYCQQ |
| | | | | | | | ARDYDFWSGSLGYWGQ | SYSTPWTFGQGTKVE |
| | | | | | | | GTLVTVSS (SEQ ID | IK (SEQ ID NO: |
| | | | | | | | NO: 511) | 512) |
| 40. | YTLTTW | GWINPN | CAKGDLWG | RASDNI | AASSL | CQQGYS | QVQLVQSGAEVKKPGA | DIQMTQSPSSLSASV |
| | YMY | RGATNY | AMDVW | GSWLA | QS | TPPTF | SVKVSCKASGYTLTTW | GDRVTITCRASDNIG |
| | (SEQ | A (SEQ | (SEQ ID | (SEQ | (SEQ | (SEQ | YMYWVRQAPGQGLEWM | SWLAWYQQKPGKAPK |
| | ID NO: | ID NO: | NO: 128) | ID NO: | ID | ID NO: | GWINPNRGATNYAQKF | LLIYAASSLQSGVPS |
| | 126) | 127) | | 129) | NO: | 130) | QGRVTMTRDTSTSTVY | RFSGSGSGTDFTLTI |
| | | | | | 76) | | MELSSLRSEDTAVYYC | SSLQPEDFATYYCQQ |
| | | | | | | | AKGDLWGAMDVWGQGT | GYSTPPTFGQGTKVE |
| | | | | | | | LVTVSS (SEQ ID | IK (SEQ ID NO: |
| | | | | | | | NO: 447) | 448) |
| 41. | YTFTSY | GIINPS | CARDTGYS | RASQSI | DASNL | CQQSYS | QVQLVQSGAEVKKPGA | DIQMTQSPSSLSASV |
| | YMH | GGSTSY | YGRYYYYG | GRWLA | QS | IPITF | SVKVSCKASGYTFTSY | GDRVTITCRASQSIG |
| | (SEQ | A (SEQ | MDVW | (SEQ | (SEQ | (SEQ | YMHWVRQAPGQGLEWM | RWLAWYQQKPGKAPK |
| | ID NO: | ID NO: | (SEQ ID | ID NO: | ID | ID NO: | GIINPSGGSTSYAQKF | LLIYDASNLQSGVPS |
| | 225) | 80) | NO: 231) | 232) | NO: | 208) | QGRVTMTRDTSTSTVY | RFSGSGSGTDFTLTI |
| | | | | | 233) | | MELSSLRSEDTAVYYC | SSLQPEDFATYYCQQ |
| | | | | | | | ARDTGYSYGRYYYYGM | SYSIPITFGQGTKVE |
| | | | | | | | DVWGQGTLVTVSS | IK (SEQ ID NO: |
| | | | | | | | (SEQ ID NO: 513) | 513) |
| 42. | YTLTDY | GIINPS | CAREEYSS | RASQGI | AASSL | CQQSYS | QVQLVQSGAEVKKPGA | DIQMTQSPSSLSASV |
| | YMH | GGSTSY | SSGYFDYW | SSWLA | QS | TPLTF | SVKVSCKASGYTLTDY | GDRVTITCRASQGIS |
| | (SEQ | A (SEQ | (SEQ ID | (SEQ | (SEQ | (SEQ | YMHWVRQAPGQGLEWM | SWLAWYQQKPGKAPK |
| | ID NO: | ID NO: | NO: 236) | ID NO: | ID | ID NO: | GIINPSGGSTSYAQKF | LLIYAASSLQSGVPS |
| | 235) | 80) | | 237) | NO: | 183) | QGRVTMTRDTSTSTVY | RFSGSGSGTDFTLTI |
| | | | | | 76) | | MELSSLRSEDTAVYYC | SSLQPEDFATYYCQQ |
| | | | | | | | AREEYSSSSGYFDYWG | SYSTPLTFGQGTKVE |
| | | | | | | | QGTLVTVSS (SEQ | IK (SEQ ID NO: |
| | | | | | | | ID NO: 514) | 515) |
| 43. | YTFTSY | GWMHPK | CARDTPYY | RASQSI | AASSL | CQQSYS | QVQLVQSGAEVKKPGA | DIQMTQSPSSLSASV |
| | GIS | SGDTGL | YYGMDVW | SSWLA | QS | VPITF | SVKVSCKASGYTFTSY | GDRVTITCRASQSIS |
| | (SEQ | T (SEQ | (SEQ ID | (SEQ | (SEQ | (SEQ | GISWVRQAPGQGLEWM | SWLAWYQQKPGKAPK |
| | ID NO: | ID NO: | NO: 241) | ID NO: | ID | ID NO: | GWMHPKSGDTGLTQKF | LLIYAASSLQSGVPS |
| | 239) | 240) | | 206) | NO: | 242) | QGRVTMTRDTSTSTVY | RFSGSGSGTDFTLTI |
| | | | | | 76) | | MELSSLRSEDTAVYYC | SSLQPEDFATYYCQQ |
| | | | | | | | ARDTPYYYYGMDVWGQ | SYSVPITFGQGTKVE |
| | | | | | | | GTTVTVSS (SEQ ID | IK (SEQ ID NO: |
| | | | | | | | NO: 516) | 517) |
| 44. | FTESSY | SAISGS | CAKERFID | QASQDI | SSLQS | QQTYSG | EVQLLESGGGLVQPGG | DIQMTQSPSSLSASV |
| | AMS | GGSTYY | YGMDVW | SNYLN | (SEQ | WT | SLRLSCAASGFTFSSY | GDRVTITCQASQDIS |
| | (SEQ | A (SEQ | (SEQ ID | (SEQ | ID | (SEQ | AMSWVRQAPGKGLEWV | NYLNWYQQKPGKAPK |
| | ID NO: | ID NO: | NO: 518) | ID NO: | NO: | ID NO: | SAISGSGGSTYYADSV | LLIYAASSLQSGVPS |
| | 484) | 113) | | 148) | 373) | 803) | KGRFTISRDNSKNTLY | RFSGSGSGTDFTLTI |
| | | | | | | | LQMNSLRAEDTAVYYC | SSLQPEDFATYYCQQ |
| | | | | | | | AKERFIDYGMDVWGQG | TYSGWTFGPGTKVDI |
| | | | | | | | TTVTVSS (SEQ ID | K (SEQ ID NO: |
| | | | | | | | NO: 519) | 520) |
| 45. | FTFGDY | SYISGD | CARDVAAT | RASQSI | AASSL | CQQSYS | EVQLVESGGGLVKPGG | DIQMTQSPSSLSASV |
| | AMS | IGYTNY | GNWYFDLW | SSYLN | QS | TPLTF | SLRLSCAASGFTFGDY | GDRVTITCRASQSIS |
| | (SEQ | A (SEQ | (SEQ ID | (SEQ | (SEQ | (SEQ | AMSWVRQAPGKGLEWV | SYLNWYQQKPGKAPK |
| | ID NO: | ID NO: | NO: 246) | ID NO: | ID | ID NO: | SYISGDIGYTNYAAPV | LLIYAASSLQSGVPS |
| | 244) | 245) | | 182) | NO: | 183) | KGRFTISRDDSKNTLY | RFSGSGSGTDFTLTI |
| | | | | | 76) | | LQMNSLKTEDTAVYYC | SSLQPEDFATYYCQQ |
| | | | | | | | ARDVAATGNWYFDLWG | SYSTPLTFGGGTKVE |
| | | | | | | | RGTLVTVSS (SEQ | IK (SEQ ID NO: |
| | | | | | | | ID NO: 521) | 470) |
| 46. | FSFSSY | SFITSS | CARDRRGD | RASQSV | GASTR | CQQYGS | EVQLLESGGGLVQPGG | EIVMTQSPATLSVSP |
| | TMN | SRTIYY | YGDSWYFD | RNYLA | AT | SPLTF | SLRLSCAASGFSFSSY | GERATLSCRASQSVR |
| | (SEQ | A (SEQ | LW (SEQ | (SEQ | (SEQ | (SEQ | TMNWVRQAPGKGLEWV | NYLAWYQQKPGQAPR |
| | ID NO: | ID NO: | ID NO: | ID NO: | ID | ID NO: | SFITSSSRTIYYADSV | LLIYGASTRATGIPA |
| | 248) | 249) | 250) | 251) | NO: | 253) | KGRFTISRDNSKNTLY | RFSGSGSGTEFTLTI |
| | | | | | 252) | | LQMNSLRAEDTAVYYC | SSLQSEDFAVYYCQQ |
| | | | | | | | ARDRRGDYGDSWYFDL | YGSSPLTFGGGTKVE |
| | | | | | | | WGRGTLVTVSS (SEQ | IK (SEQ ID NO: |
| | | | | | | | ID NO: 522) | 523) |
| 47. | YTFTGH | GIINPS | CARDTGYS | RASQSI | DASNL | CQQSYS | QVQLVQSGAEVKKPGA | DIQMTQSPSSLSASV |
| | YMH | GGSTSY | YGRYYYYG | GRWLA | QS | IPITF | SVKVSCKASGYTFSKH | GDRVTITCRASQSIS |
| | (SEQ | A (SEQ | MDVW | (SEQ | (SEQ | (SEQ | FVHWVRQAPGQGLEWM | SWLAWYQQKPGKAPK |
| | ID NO: | ID NO: | (SEQ ID | ID NO: | ID | ID NO: | GWMNPNSGNSGYAQKF | LLIYAASTLQSGVPS |
| | 255) | 80) | NO: 231) | 232) | NO: | 208) | QGRVTMTRDTSTSTVY | RFSGSGSGTDFTLTI |
| | | | | | 233) | | MELSSLRSEDTAVYYC | SSLQPEDFATYYCQQ |
| | | | | | | | ARGEGGYYYYGMDVWG | SYSTPWTFGQGTKVE |
| | | | | | | | QGTLVTVSS (SEQ | IK (SEQ ID NO: |
| | | | | | | | ID NO: 524) | 525) |
| 48. | YTFSKH | GWMNPN | CARGEGGY | RASQSI | AASTL | CQQSYS | EVQLLESGGGLVQPGG | DIQMTQSPSSLSASV |
| | FVH | SGNSGY | YYYGMDVW | SSWLA | QS | TPWTF | SLRLSCAASGFTFGSY | GDRVTITCRASQPLS |
| | (SEQ | A (SEQ | (SEQ ID | (SEQ | (SEQ | (SEQ | SMSWVRQAPGKGLEWV | NWLAWYQQKPGKAPK |
| | ID NO: | ID NO: | NO: 259) | ID NO: | ID | ID NO: | SAIGTGGGTYYADSVK | LLIYAASSLQSGVPS |
| | 257) | 258) | | 206) | NO: | 124) | GRFTISRDNSKNTLYL | RFSGSGSGTDFTLTI |
| | | | | | 123) | | QMNSLRAEDTAVYYCA | SSLQPEDFATYYCQQ |
| | | | | | | | KGTPYYYYYGMDVWGQ | AISFPLTFGGGTKVE |
| | | | | | | | GTMVTVSS (SEQ ID | IK (SEQ ID NO: |
| | | | | | | | NO: 526) | 527) |
| 49. | FTFGSY | SAIGTG | CAKGTPYY | RASQPL | AASSL | CQQAIS | QVQLVQSGAEVKKPGA | DIQMTQSPSSLSASV |
| | SMS | GGTYYA | YYYGMDVW | SNWLA | QS | FPLTF | SVKVSCKASGYTFTSY | GDRVTITCQSSEDIS |
| | (SEQ | (SEQ | (SEQ ID | (SEQ | (SEQ | (SEQ | YMHWVRQAPGQGLEWM | SSLNWYQQKPGKAPK |
| | ID NO: | ID NO: | NO: 263) | ID NO: | ID | ID NO: | GWMNPNSGNTGYAQKF | LLIYAASSLQIGVPS |
| | 261) | 262) | | 264) | NO: | 265) | QGRVTMTRDTSTSTVY | RFSGSGSGTDFTLTI |
| | | | | | 76) | | MELSSLRSEDTAVYYC | SSLQPEDFATYYCQQ |
| | | | | | | | ARDLGYYDSSGYFGAF | TYSTPYTFGQGTKVE |
| | | | | | | | DIWGQGTTVTVSS | IK (SEQ ID NO: |
| | | | | | | | (SEQ ID NO: 528) | 529) |
| 50. | YTFTSY | GWMNPN | CARDLGYY | QSSEDI | AASSL | CQQTYS | QVQLVQSGAEVKKPGA | DIQMTQSPSSLSASV |
| | YMH | SGNTGY | DSSGYFGA | SSSLN | QI | TPYTF | SVKVSCKASGYTFTSY | GDRVTITCRASQGIG |
| | (SEQ | A (SEQ | FDIW | (SEQ | (SEQ | (SEQ | GISWVRQAPGQGLEWM | NWLAWYQQKPGKAPK |
| | ID NO: | ID NO: | (SEQ ID | ID NO: | ID | ID NO: | GIINPRGGSTIFAQKF | LLIYAASNLETGVPS |
| | 225) | 215) | NO: 267) | 268) | NO: | 270) | QGRVTMTRDTSTSTVY | RFSGSGSGTDFTLTI |
| | | | | | 269) | | MELSSLRSEDTAVYYC | SSLQPEDFATYYCQQ |
| | | | | | | | ARGTRSSGWYGWFDPW | IHSYPLTFGGGTKVE |
| | | | | | | | GQGTLVTVSS (SEQ | IK (SEQ ID NO: |
| | | | | | | | ID NO: 530) | 531) |
| 51. | YTFTSY | GIINPR | CARGTRSS | RASQGI | AASNL | CQQIHS | EVQLVESGGGLVKPGG | DIVMTQSPLSLPVTP |
| | GIS | GGSTIF | GWYGWFDP | GNWLA | ET | YPLTF | SLRLSCAASGFIFQDS | GEPASISCRSSQSLL |
| | (SEQ | A (SEQ | W (SEQ | (SEQ | (SEQ | (SEQ | AIHWVRQAPGKGLEWV | HSNGYNYLDWYLQKP |
| | ID NO: | ID NO: | ID NO: | ID NO: | ID | ID NO: | SAIGTGGGTYYAAPVK | GQSPQLLIYDASNLE |
| | 239) | 272 | 273) | 274) | NO: | 276) | GRFTISRDDSKNTLYL | TGVPDRFSGSGSGTD |
| | | | | | 275) | | QMNSLKTEDTAVYYCA | FTLKISRVEAEDVGV |
| | | | | | | | RSYCSGGSCSLGSWGQ | YYCMQALQTPLTFGQ |
| | | | | | | | GTLVTVSS (SEQ ID | GTKVEIK (SEQ ID |
| | | | | | | | NO: 532) | NO: 533) |
| 52. | FTFDDY | SYISSS | CAREIAAA | RASQSI | AASSL | CQQSYS | EVQLLESGGGLVQPGG | DIQMTQSPSSLSASV |
| | GMS | SSYIYY | GFYGMDVW | SSYLN | QS | TPLTF | SLRLSCAASGFTFDDY | GDRVTITCRASQSIS |
| | (SEQ | A (SEQ | (SEQ ID | (SEQ | (SEQ | (SEQ | GMSWVRQAPGKGLEWV | SYLNWYQQKPGKAPK |
| | ID NO: | ID NO: | NO: 280) | ID NO: | ID | ID NO: | SYISSSSSYIYYADSV | LLIYAASSLQSGVPS |
| | 278) | 279) | | 182) | NO: | 183) | KGRFTISRDNSKNTLY | RFSGSGSGTDFTLTI |
| | | | | | 76) | | LQMNSLRAEDTAVYYC | SSLQPEDFATYYCQQ |
| | | | | | | | AREIAAAGFYGMDVWG | SYSTPLTFGGGTKVE |
| | | | | | | | QGTTVTVSS (SEQ | IK (SEQ ID NO: |
| | | | | | | | ID NO: 534) | 470) |
| 53. | YTFTSY | GWMNPN | CAREGLGY | RASQGI | SSLQS | QQSYST | QVQLVQSGAEVKKPGA | DIQMTQSPSSLSASV |
| | YMH | SGNTGY | CTNGVCWN | SSWLA | (SEQ | PYT | SVKVSCKASGYTFTSY | GDRVTITCRASQGIS |
| | (SEQ | A (SEQ | YYGMDVW | (SEQ | ID | (SEQ | YMHWVRQAPGQGLEWM | SWLAWYQQKPGKAPK |
| | ID NO: | ID NO: | (SEQ ID | ID NO: | NO: | ID NO: | GWMNPNSGNTGYAQKF | LLIYGASSLQSGVPS |
| | 225) | 215) | NO: 535) | 237) | 373) | 536) | QGRVTMTRDTSTSTVY | RFSGSGSGTDFTLTI |
| | | | | | | | MELSSLRSEDTAVYYC | SSLQPEDFATYYCQQ |
| | | | | | | | AREGLGYCTNGVCWNY | SYSTPYTFGQGTKVE |
| | | | | | | | YGMDVWGQGTLVTVSS | IK (SEQ ID NO: |
| | | | | | | | (SEQ ID NO: 537) | 538) |
| 54. | GTLSRY | GGIIPI | CARDRVYY | RASQSV | GASTR | CQQYGS | QVQLVQSGAEVKKPGS | EIVMTQSPATLSVSP |
| | GVS | FGTTNY | DSSGYPTW | SSSYLA | AT | SPITF | SVKVSCKASGGTLSRY | GERATLSCRASQSVS |
| | (SEQ | A (SEQ | YFDLW | (SEQ | (SEQ | (SEQ | GVSWVRQAPGQGLEWM | SSYLAWYQQKPGQAP |
| | ID NO: | ID NO: | (SEQ ID | ID NO: | ID | ID NO: | GGIIPIFGTTNYAQKF | RLLIYGASTRATGIP |
| | 282) | 283) | NO: 284) | 285) | NO: | 286) | QGRVTITADESTSTAY | ARFSGSGSGTEFTLT |
| | | | | | 252) | | MELSSLRSEDTAVYYC | ISSLQSEDFAVYYCQ |
| | | | | | | | ARDRVYYDSSGYPTWY | QYGSSPITFGQGTKV |
| | | | | | | | FDLWGRGTLVTVSS | EIK (SEQ ID NO: |
| | | | | | | | (SEQ ID NO: 539) | 540) |
| 55. | FTFDDF | SGISGN | CARDASYG | QASQDI | KASTL | CQQANS | EVQLLESGGGLVQPGG | DIQMTQSPSSLSASV |
| | AMH | GDSRYY | GNYGMDVW | RNYLN | ES | FPLTF | SLRLSCAASGFTFDDF | GDRVTITCQASQDIR |
| | (SEQ | A (SEQ | (SEQ ID | (SEQ | (SEQ | (SEQ | AMHWVRQAPGKGLEWV | NYLNWYQQKPGKAPK |
| | ID NO: | ID NO: | NO: 290) | ID NO: | ID | ID NO: | SGISGNGDSRYYADSV | LLIYKASTLESGVPS |
| | 288) | 289) | | 291) | NO: | 177) | KGRFTISRDNSKNTLY | RFSGSGSGTDFTLTI |
| | | | | | 149) | | LQMNSLRAEDTAVYYC | SSLQPEDFATYYCQQ |
| | | | | | | | ARDAS YGGNYGMDVWG | ANSFPLTFGPGTKVD |
| | | | | | | | QGTTVTVSS (SEQ | IK (SEQ ID NO: |
| | | | | | | | ID NO: 541) | 542) |
| 56. | FTFSSY | SAIGTG | CAREWLVP | RASQSI | GASNL | CQQSYS | EVQLVESGGGLVKPGG | DIQMTQSPSSLSASV |
| | WMS | GGTYYA | YYGMDVW | SRWLA | QS | TPWTF | SLRLSCAASGFTFSSY | GDRVTITCRASQSIS |
| | (SEQ | (SEQ | (SEQ ID | (SEQ | (SEQ | (SEQ | WMSWVRQAPGKGLEWV | RWLAWYQQKPGKAPK |
| | ID NO: | ID NO: | NO: 293) | ID NO: | ID | ID NO: | SAIGTGGGTYYAAPVK | LLIYGASNLQSGVPS |
| | 179) | 262) | | 294) | NO: | 124) | GRFTISRDDSKNTLYL | RFSGSGSGTDFTLTI |
| | | | | | 295) | | QMNSLKTEDTAVYYCA | SSLQPEDFATYYCQQ |
| | | | | | | | REWLVPYYGMDVWGQG | SYSTPWTFGQGTKVE |
| | | | | | | | TTVTVSS (SEQ ID | IK (SEQ ID NO: |
| | | | | | | | NO: 543) | 544) |
| 57. | FSVSSN | AGISYD | CARSRGIA | KSSQSV | WASTR | CHQYYG | EVQLLESGGGLVQPGG | DIVMTQSPDSLAVSL |
| | YMS | GSSKPY | ARPLQHW | LYSSNN | QS | HPPTF | SLRLSCAASGFSVSSN | GERATINCKSSQSVL |
| | (SEQ | A (SEQ | (SEQ ID | KNYLA | (SEQ | (SEQ | YMSWVRQAPGKGLEWV | YSSNNKNYLAWYQQK |
| | ID NO: | ID NO: | NO: 299) | (SEQ | ID | ID NO: | AGISYDGSSKPYADSV | PGQPPKLLIYWASTR |
| | 297) | 298) | | ID NO: | NO: | 302) | KGRFTISRDNSKNTLY | QSGVPDRFSGSGSGT |
| | | | | 300) | 301) | | LQMNSLRAEDTAVYYC | DFTLTISSLQAEDVA |
| | | | | | | | ARSRGIAARPLQHWGQ | VYYCHQYYGHPPTFG |
| | | | | | | | GTLVTVSS (SEQ ID | GGTKVEIK (SEQ |
| | | | | | | | NO: 545) | ID NO: 546) |
| 58. | FSVSSN | AGISYD | CARSRGIA | KSSQSV | QASTR | CHQYYG | EVQLLESGGGLVQPGG | DIVMTQSPDSLAVSL |
| | YMS | GSSKPY | ARPLQHW | LYSSNN | QS | HPPTF | SLRLSCAASGFSVSSN | GERATINCKSSQSVL |
| | (SEQ | A (SEQ | (SEQ ID | KNYLA | (SEQ | (SEQ | YMSWVRQAPGKGLEWV | YSSNNKNYLAWYQQK |
| | ID NO: | ID NO: | NO: 299) | (SEQ | ID | ID NO: | AGISYDGSSKPYADSV | PGQPPKLLIYQASTR |
| | 297) | 298) | | ID NO: | NO: | 302) | KGRFTISRDNSKNTLY | QSGVPDRFSGSGSGT |
| | | | | 300) | 304) | | LQMNSLRAEDTAVYYC | DFTLTISSLQAEDVA |
| | | | | | | | ARSRGIAARPLQHWGQ | VYYCHQYYGHPPTFG |
| | | | | | | | GTLVTVSS (SEQ ID | GGTKVEIK (SEQ |
| | | | | | | | NO: 545) | ID NO: 547) |
| 59. | FSFSDY | SAISGS | CARDGGWQ | RASQGI | DASNL | CQQSYS | EVQLLESGGGLVQPGG | DIQMTQSPSSLSASV |
| | GMH | GGSTYY | PAAILDYW | SNNLN | ET | TPLTF | SLRLSCAASGFSFSDY | GDRVTITCRASQGIS |
| | (SEQ | A (SEQ | (SEQ ID | (SEQ | (SEQ | (SEQ | GMHWVRQAPGKGLEWV | NNLNWYQQKPGKAPK |
| | ID NO: | ID NO: | NO: 307) | ID NO: | ID | ID NO: | SAISGSGGSTYYADSV | LLIYDASNLETGVPS |
| | 306) | 113) | | 115) | NO: | 183) | KGRFTISRDNSKNTLY | RFSGSGSGTDFTLTI |
| | | | | | 169) | | LQMNSLRAEDTAVYYC | SSLQPEDFATYYCQQ |
| | | | | | | | ARDGGWQPAAILDYWG | SYSTPLTFGGGTKVE |
| | | | | | | | QGTLVTVSS (SEQ | IK (SEQ ID NO: |
| | | | | | | | ID NO: 548) | 549) |
| 60. | FTFSDH | SVIYGG | CARDPAVA | RASQGI | DASNL | CQQSYS | EVQLLESGGGLVQPGG | DIQMTQSPSSLSASV |
| | GMH | ESTYYA | GGGIFDYW | SNYLA | ET | TCYTF | SLRLSCAASGFTFSDH | GDRVTITCRASQGIS |
| | (SEQ | (SEQ | (SEQ ID | (SEQ | (SEQ | (SEQ | GMHWVRQAPGKGLEWV | NYLAWYQQKPGKAPK |
| | ID NO: | ID NO: | NO: 311) | ID NO: | ID | ID NO: | SVIYGGESTYYADSVK | LLIYDASNLETGVPS |
| | 309) | 310) | | 228) | NO: | 312) | GRFTISRDNSKNTLYL | RFSGSGSGTDFTLTI |
| | | | | | 169) | | QMNSLRAEDTAVYYCA | SSLQPEDFATYYCQQ |
| | | | | | | | RDPAVAGGGIFDYWGQ | SYSTCYTFGQGTKLE |
| | | | | | | | GTLVTVSS (SEQ ID | IK (SEQ ID NO: |
| | | | | | | | NO: 550) | 551) |
| 61. | DTFTGY | GWINPN | CARSGLWL | RASQTI | DASTL | CQQYSS | QVQLVQSGAEVKKPGA | DIQMTQSPSSLSASV |
| | YIH | SGGTNY | GSYYGMDV | SIWLA | QS | YPLTF | SVKVSCKASGDTFTGY | GDRVTITCRASQTIS |
| | (SEQ | A (SEQ | W (SEQ | (SEQ | (SEQ | (SEQ | YIHWVRQAPGQGLEWM | IWLAWYQQKPGKAPK |
| | ID NO: | ID NO: | ID NO: | ID NO: | ID | ID NO: | GWINPNSGGTNYAQKF | LLIYDASTLQSGVPS |
| | 314) | 315) | 316) | 317) | NO: | 319) | QGRVTMTRDTSTSTVY | RFSGSGSGTDFTLTI |
| | | | | | 318) | | MELSSLRSEDTAVYYC | SSLQPEDFATYYCQQ |
| | | | | | | | ARSGLWLGSYYGMDVW | YSSYPLTFGQGTKVE |
| | | | | | | | GQGTLVTVSS (SEQ | IK (SEQ ID NO: |
| | | | | | | | ID NO: 552) | 553) |
| 62. | YTFTSY | GWINPN | CARSPYYY | RASHFI | AASTL | CQQSYS | QVQLVQSGAEVKKPGA | DIQMTQSPSSLSASV |
| | DIN | SGTTGY | YGMDVW | SRWVA | QS | GISF | SVKVSCKASGYTFTSY | GDRVTITCRASHFIS |
| | (SEQ | A (SEQ | (SEQ ID | (SEQ | (SEQ | (SEQ | DINWVRQAPGQGLEWM | RWVAWYQQKPGKAPK |
| | ID NO: | ID NO: | NO: 323) | ID NO: | ID | ID NO: | GWINPNSGTTGYAQKF | LLIYAASTLQSGVPS |
| | 321) | 322) | | 324) | NO: | 325) | QGRVTMTRDTSTSTVY | RFSGSGSGTDFTLTI |
| | | | | | 123) | | MELSSLRSEDTAVYYC | SSLQPEDFATYYCQQ |
| | | | | | | | ARSPYYYYGMDVWGQG | SYSGISFGPGTKVDI |
| | | | | | | | TTVTVSS (SEQ ID | K (SEQ ID NO: |
| | | | | | | | NO: 554) | 555) |
| 63. | FTFNNY | SRINSD | CARGAYYY | RASQSV | ATSSR | CQQYYS | EVQLLESGGGLVQPGG | EIVMTQSPATLSVSP |
| | GMN | GSSTSY | YYMDVW | SGSYLA | AS | GLTF | SLRLSCAASGFTFNNY | GERATLSCRASQSVS |
| | (SEQ | A (SEQ | (SEQ ID | (SEQ | (SEQ | (SEQ | GMNWVRQAPGKGLEWV | GSYLAWYQQKPGQAP |
| | ID NO: | ID NO: | NO: 329) | ID NO: | ID | ID NO: | SRINSDGSSTSYADSV | RLLIYATSSRASGIP |
| | 327) | 328) | | 330) | NO: | 332) | KGRFTISRDNSKNTLY | ARFSGSGSGTEFTLT |
| | | | | | 331) | | LQMNSLRAEDTAVYYC | ISSLQSEDFAVYYCQ |
| | | | | | | | ARGAYYYYYMDVWGQG | QYYSGLTFGQGTKVE |
| | | | | | | | TLVTVSS (SEQ ID | IK (SEQ ID NO: |
| | | | | | | | NO: 556) | 557) |
| 64. | FTFSNS | AHIWND | CARDRTDP | RASQDI | DASSL | CQQATS | EVQLLESGGGLVQPGG | DIQMTQSPSSLSASV |
| | DMN | GSQKYY | GYSSAMDV | RNYLG | ET | LPLTF | SLRLSCAASGFTFSNS | GDRVTITCRASQDIR |
| | (SEQ | A (SEQ | W (SEQ | (SEQ | (SEQ | (SEQ | DMNWVRQAPGKGLEWV | NYLGWYQQKPGKAPK |
| | ID NO: | ID NO: | ID NO: | ID NO: | ID | ID NO: | AHIWNDGSQKYYADSV | LLIYDASSLETGVPS |
| | 334) | 335) | 336) | 337) | NO: | 339) | KGRFTISRDNSKNTLY | RFSGSGSGTDFTLTI |
| | | | | | 338) | | LQMNSLRAEDTAVYYC | SSLQPEDFATYYCQQ |
| | | | | | | | ARDRTDPGYSSAMDVW | ATSLPLTFGGGTKVE |
| | | | | | | | GQGTTVTVSS (SEQ | IK (SEQ ID NO: |
| | | | | | | | ID NO: 558) | 559) |
| 65. | YTFTSY | GWMNPN | CAKDSDYS | RASQDI | QASSL | CQQSYT | QVQLVQSGAEVKKPGA | DIQMTQSPSSLSASV |
| | DIN | SGNTGY | NLLWDYW | TNDLG | ES | IPLTF | SVKVSCKASGYTFTSY | GDRVTITCRASQDIT |
| | (SEQ | A (SEQ | (SEQ ID | (SEQ | (SEQ | (SEQ | DINWVRQAPGQGLEWM | NDLGWYQQKPGKAPK |
| | ID NO: | ID NO: | NO: 341) | ID NO: | ID | ID NO: | GWMNPNSGNTGYAQKF | LLIYQASSLESGVPS |
| | 321) | 215) | | 342) | NO: | 344) | QGRVTMTRDTSTSTVY | RFSGSGSGTDFTLTI |
| | | | | | 343) | | MELSSLRSEDTAVYYC | SSLQPEDFATYYCQQ |
| | | | | | | | AKDSDYSNLLWDYWGQ | SYTIPLTFGQGTKVE |
| | | | | | | | GTLVTVSS (SEQ ID | IK (SEQ ID NO: |
| | | | | | | | NO: 560) | 561) |
| 66. | YTFTGH | GIINPS | CARDGAWF | RASQGI | SNLET | QQYYSF | QVQLVQSGAEVKKPGA | DIQMTQSPSSLSASV |
| | YMH | GGSTSY | GEEYYYGM | SNWLA | (SEQ | PLYT | SVKVSCKASGYTFTGH | GDRVTITCRASQGIS |
| | (SEQ | A (SEQ | DVW (SEQ | (SEQ | ID | (SEQ | YMHWVRQAPGQGLEWM | NWLAWYQQKPGKAPK |
| | ID NO: | ID NO: | ID NO: | ID NO: | NO: | ID NO: | GIINPSGGSTSYAQKF | LLIYDASNLETGVPS |
| | 255) | 80) | 562) | 563) | 502) | 564) | QGRVTMTRDTSTSTVY | RFSGSGSGTDFTLTI |
| | | | | | | | MELSSLRSEDTAVYYC | SSLQPEDFATYYCQQ |
| | | | | | | | ARDGAWFGEEYYYGMD | YYSFPLYTFGQGTKV |
| | | | | | | | VWGQGTTVTVSS | EIK (SEQ ID NO: |
| | | | | | | | (SEQ ID NO: 565) | 566) |
| 67. | YTFTGY | GMIYPR | CAMTGWGY | RASQGI | STLQS | QQSYSA | QVQLVQSGAEVKKPGA | DIQMTQSPSSLSASV |
| | YMH | DGSTSY | GMDVW | NNYLA | (SEQ | PPT | SVKVSCKASGYTFTGY | GDRVTITCRASQGIN |
| | (SEQ | A (SEQ | (SEQ ID | (SEQ | ID | (SEQ | YMHWVRQAPGQGLEWM | NYLAWYQQKPGKAPK |
| | ID NO: | ID NO: | NO: 568) | ID NO: | NO: | ID NO: | GMIYPRDGSTSYAQKF | LLIYDASTLQSGVPS |
| | 138) | 567) | | 569) | 431) | 570) | QGRVTMTRDTSTSTVY | RFSGSGSGTDFTLTI |
| | | | | | | | MELSSLRSEDTAVYYC | SSLQPEDFATYYCQQ |
| | | | | | | | AMTGWGYGMDVWGKGT | SYSAPPTFGQGTKLE |
| | | | | | | | TVTVSS (SEQ ID | IK (SEQ ID NO: |
| | | | | | | | NO: 571) | 572) |
| 68. | FTFGDY | AWSYD | CAKDICSS | RASQNI | DASNL | CQQANS | EVQLLESGGGLVQPGG | DIQMTQSPSSLSASV |
| | AMS | GTNKYY | TSCYFDLW | NNYVN | ET | FPPTF | SLRLSCAASGFTFGDY | GDRVTITCRASQNIN |
| | (SEQ | A (SEQ | (SEQ ID | (SEQ | (SEQ | (SEQ | AMSWVRQAPGKGLEWV | NYVNWYQQKPGKAPK |
| | ID NO: | ID NO: | NO: 347) | ID NO: | ID | ID NO: | AVVSYDGTNKYYADSV | LLIYDASNLETGVPS |
| | 244) | 346) | | 348) | NO: | 349) | KGRFTISRDNSKNTLY | RFSGSGSGTDFTLTI |
| | | | | | 169) | | LQMNSLRAEDTAVYYC | SSLQPEDFATYYCQQ |
| | | | | | | | AKDICSSTSCYFDLWG | ANSFPPTFGQGTRLE |
| | | | | | | | RGTLVTVSS (SEQ | IK (SEQ ID NO: |
| | | | | | | | ID NO: 573) | 574) |
| 69. | YTFTSY | GIIDPS | CAREEWSS | RASQGI | ATSSL | CQQTYS | QVQLVQSGAEVKKPGA | DIQMTQSPSSLSASV |
| | YMH | GGSTSY | GGVGYFDY | SSYLA | QT | IPITF | SVKVSCKASGYTFTSY | GDRVTITCRASQGIS |
| | (SEQ | A (SEQ | W (SEQ | (SEQ | (SEQ | (SEQ | YMHWVRQAPGQGLEWM | SYLAWYQQKPGKAPK |
| | ID NO: | ID NO: | ID NO: | ID NO: | ID | ID NO: | GIIDPSGGSTSYAQKF | LLIYATSSLQTGVPS |
| | 225) | 351) | 352) | 353) | NO: | 355) | QGRVTMTRDTSTSTVY | RFSGSGSGTDFTLTI |
| | | | | | 354) | | MELSSLRSEDTAVYYC | SSLQPEDFATYYCQQ |
| | | | | | | | AREEWSSGGVGYFDYW | TYSIPITFGQGTRLE |
| | | | | | | | GQGTLVTVSS (SEQ | IK (SEQ ID NO: |
| | | | | | | | ID NO: 575) | 576) |
| 70. | YPFTDY | GWIKPN | CARDRFVG | RASQSI | SSLQS | QQSYDT | QVQLVQSGAEVKKPGA | DIQMTQSPSSLSASV |
| | YMH | SGDTEY | KPDYYYYG | SVWLA | (SEQ | PYT | SVKVSCKASGYPFTDY | GDRVTITCRASQSIS |
| | (SEQ | A (SEQ | MDVW | (SEQ | ID | (SEQ | YMHWVRQAPGQGLEWM | VWLAWYQQKPGKAPK |
| | ID NO: | ID NO: | (SEQ ID | ID NO: | NO: | ID NO: | GWIKPNSGDTEYAQKF | LLIYAASSLQSGVPS |
| | 577) | 578) | NO: 579) | 580) | 373) | 581) | QGRVTMTRDTSTSTVY | RFSGSGSGTDFTLTI |
| | | | | | | | MELSSLRSEDTAVYYC | SSLQPEDFATYYCQQ |
| | | | | | | | ARDRFVGKPDYYYYGM | SYDTPYTFGQGTKLE |
| | | | | | | | DVWGQGTMVTVSS | IK (SEQ ID NO: |
| | | | | | | | (SEQ ID NO: 582) | 583) |
| 71. | YTFTSY | GIINPS | CARDSVAG | RASQGI | AASSL | CQQSYS | QVQLVQSGAEVKKPGA | DIQMTQSPSSLSASV |
| | YMH | GGSTSY | TGGRYYGM | SNYFA | QG | LPYTF | SVKVSCKASGYTFTSY | GDRVTITCRASQGIS |
| | (SEQ | A (SEQ | DVW (SEQ | (SEQ | (SEQ | (SEQ | YMHWVRQAPGQGLEWM | NYFAWYQQKPGKAPK |
| | ID NO: | ID NO: | ID NO: | ID NO: | ID | ID NO: | GIINPSGGSTSYAQKF | LLIYAASSLQGGVPS |
| | 225) | 80) | 361) | 362) | NO: | 364) | QGRVTMTRDTSTSTVY | RFSGSGSGTDFTLTI |
| | | | | | 363) | | MELSSLRSEDTAVYYC | SSLQPEDFATYYCQQ |
| | | | | | | | ARDSVAGTGGRYYGMD | SYSLPYTFGQGTKLE |
| | | | | | | | VWGQGTLVTVSS | IK (SEQ ID NO: |
| | | | | | | | (SEQ ID NO: 584) | 585) |
| 72. | YTFTSY | GVINPI | CASGAPSY | RASQSI | SYLAT | QQSYST | QVQLVQSGAEVKKPGA | DIQMTQSPSSLSASV |
| | YMH | GGTTTY | YYYGMDVW | SSYLN | (SEQ | PLT | SVKVSCKASGYTFTSY | GDRVTITCRASQSIS |
| | (SEQ | A (SEQ | (SEQ ID | (SEQ | ID | (SEQ | YMHWVRQAPGQGLEWM | SYLNWYQQKPGKAPK |
| | ID NO: | ID NO: | NO: 587) | ID NO: | NO: | ID NO: | GVINPIGGTTTYAQKF | LLIYGTSYLATGVPS |
| | 225) | 586) | | 182) | 588) | 440) | QGRVTMTRDTSTSTVY | RFSGSGSGTDFTLTI |
| | | | | | | | MELSSLRSEDTAVYYC | SSLQPEDFATYYCQQ |
| | | | | | | | ASGAPSYYYYGMDVWG | SYSTPLTFGQGTKVE |
| | | | | | | | QGTLVTVSS (SEQ | IK (SEQ ID NO: |
| | | | | | | | ID NO: 589) | 590) |
| 73. | YTFTSN | GRINPH | CARAGQLW | QASQDI | TALRT | QQSYSH | QVQLVQSGAEVKKPGA | DIQMTQSPSSLSASV |
| | YVH | SGDTSY | SDWYFDLW | RNYLN | (SEQ | PLT | SVKVSCKASGYTFTSN | GDRVTITCQASQDIR |
| | (SEQ | A (SEQ | (SEQ ID | (SEQ | ID | (SEQ | YVHWVRQAPGQGLEWM | NYLNWYQQKPGKAPK |
| | ID NO: | ID NO: | NO: 594) | ID NO: | NO: | ID NO: | GRINPHSGDTSYAQKF | LLIYAATALRTGVPS |
| | 592) | 593) | | 291) | 595) | 596) | QGRVTMTRDTSTSTVY | RFSGSGSGTDFTLTI |
| | | | | | | | MELSSLRSEDTAVYYC | SSLQPEDFATYYCQQ |
| | | | | | | | ARAGQLWSDWYFDLWG | SYSHPLTFGQGTKVE |
| | | | | | | | RGTLVTVSS (SEQ | IK (SEQ ID NO: |
| | | | | | | | ID NO: 597) | 598) |
| 74. | YTFTGY | GIINPS | CTTADYYY | RASQGI | AASSL | CQQYYS | QVQLVQSGAEVKKPGA | DIQMTQSPSSLSASV |
| | YMH | GGNTKY | YMDVW | SNYLA | QS | NADF | SVKVSCKASGYTFTGY | GDRVTITCRASQGIS |
| | (SEQ | A (SEQ | (SEQ ID | (SEQ | (SEQ | (SEQ | YMHWVRQAPGQGLEWM | NYLAWYQQKPGKAPK |
| | ID NO: | ID NO: | NO: 367) | ID NO: | ID | ID NO: | GIINPSGGNTKYAQKF | LLIYAASSLQSGVPS |
| | 138) | 366) | | 228) | NO: | 368) | QGRVTMTRDTSTSTVY | RFSGSGSGTDFTLTI |
| | | | | | 76) | | MELSSLRSEDTAVYYC | SSLQPEDFATYYCQQ |
| | | | | | | | TTADYYYYMDVWGKGT | YYSNADFGQGTKVEI |
| | | | | | | | TVTVSS (SEQ ID | K (SEQ ID NO: |
| | | | | | | | NO: 599) | 600) |
| 75. | FTFSDF | SYISGD | CARDRPYY | RASQSV | SSLQS | QQYKSY | EVQLLESGGGLVQPGG | DIQMTQSPSSLSASV |
| | WMH | SGYTNY | YYMDVW | SRSLA | (SEQ | PVT | SLRLSCAASGFTFSDF | GDRVTITCRASQSVS |
| | (SEQ | A (SEQ | (SEQ ID | (SEQ | ID | (SEQ | WMHWVRQAPGKGLEWI | RSLAWYQQKPGKAPK |
| | ID NO: | ID NO: | NO: 371) | ID NO: | NO: | ID NO: | SYISGDSGYTNYADSV | LLIYAASSLQSGVPS |
| | 370) | 180) | | 372) | 373) | 374) | KGRFTISRDNSKNTLY | RFSGSGSGTDFTLTI |
| | | | | | | | LQMNSLRAEDTAVYYC | SSLQPEDFATYYCQQ |
| | | | | | | | ARDRPYYYYMDVWGKG | YKSYPVTFGQGTKVE |
| | | | | | | | TTVTVSS (SEQ ID | IK (SEQ ID NO: |
| | | | | | | | NO: 601) | 602) |
| 76. | FTFDDY | SDISGS | CAKDVVVA | QASQDI | SYLQS | QQAHNY | EVQLLESGGGLVQPGG | DIQMTQSPSSLSASV |
| | TMH | GGSTYY | GTPLHFDY | SNYLN | (SEQ | PIT | SLRLSCAASGFTFDDY | GDRVTITCQASQDIS |
| | (SEQ | A (SEQ | W (SEQ | (SEQ | ID | (SEQ | TMHWVRQAPGKGLEWV | NYLNWYQQKPGKAPK |
| | ID NO: | ID NO: | ID NO: | ID NO: | NO: | ID NO: | SDISGSGGSTYYADSV | LLIYAASYLQSGVPS |
| | 376) | 377) | 378) | 148) | 379) | 380) | KGRFTISRDNSKNTLY | RFSGSGSGTDFTLTI |
| | | | | | | | LQMNSLRAEDTAVYYC | SSLQPEDFATYYCQQ |
| | | | | | | | AKDVVVAGTPLHFDYW | AHNYPITFGQGTRLE |
| | | | | | | | GQGTLVTVSS (SEQ | IK (SEQ ID NO: |
| | | | | | | | ID NO: 603) | 604) |
| 77. | FTFSNA | ASISST | CAREWGA | RASQSI | SSLQS | QQANAF | EVQLLESGGGLVQPGG | DIQMTQSPSSLSASV |
| | WMS | SAYIDY | TTFDYW | STWLA | (SEQ | PPT | SLRLSCAASEFTFSNA | GDRVTITCRASQSIS |
| | (SEQ | A (SEQ | (SEQ ID | (SEQ | ID | (SEQ | WMSWVRQAPGKGLEWV | TWLAWYQQKPGKAPK |
| | ID NO: | ID NO: | NO: 383) | ID NO: | NO: | ID NO: | ASISSTSAYIDYADSV | LLIYAASSLQSGVPS |
| | 193) | 382) | | 384) | 373) | 385) | KGRFTISRDNSKNTLY | RFSGSGSGTDFTLTI |
| | | | | | | | LQMNSLRAEDTAVYYC | SSLQPEDFATYYCQQ |
| | | | | | | | AREWGATTFDYWGQG | ANAFPPTFGQGTRLE |
| | | | | | | | TLVTVSS (SEQ ID | IK (SEQ ID NO: |
| | | | | | | | NO: 605) | 606) |
| 78. | GTFSSY | GWMEPH | CAKGGFSW | KSSQSV | STRES | QQYYST | QVQLVQSGAEVKKPGS | DIVMTQSPDSLAVSL |
| | AIS | TGNTRY | FDPW | LYSSNN | (SEQ | PPT | SVKVSCKASGGTFSSY | GERATINCKSSQSVL |
| | (SEQ | A (SEQ | (SEQ ID | KNYLA | ID | (SEQ | AISWVRQAPGQGLEWM | YSSNNKNYLAWYQQK |
| | ID NO: | ID NO: | NO: 388) | (SEQ | NO: | ID NO: | GWMEPHTGNTRYAQKF | PGQPPKLLIYWASTR |
| | 88) | 387) | | ID NO: | 389) | 390) | QGRVTITADESTSTAY | ESGVPDRFSGSGSGT |
| | | | | 300) | | | MELSSLRSEDTAVYYC | DFTLTISSLQAEDVA |
| | | | | | | | AKGGFSWFDPWGQGTL | VYYCQQYYSTPPTFG |
| | | | | | | | VTVSS (SEQ ID | QGTRLEIK (SEQ |
| | | | | | | | NO: 607) | ID NO: 608) |
| 79. | FTFDDY | ASITSS | CARERVDW | RASQGI | STRAT | QQYYTY | EVQLLESGGGLVKPGG | EIVMTQSPATLSVSP |
| | AMH | SAFIDY | NSYFDLW | SNSYLA | (SEQ | PPT | SLRLSCAASGFTFDDY | GERATLSCRASQGIS |
| | (SEQ | A (SEQ | (SEQ ID | (SEQ | ID | (SEQ | AMHWVRQAPGKGLEWV | NSYLAWYQQKPGQAP |
| | ID NO: | ID NO: | NO: 393) | ID NO: | NO: | ID NO: | ASITSSSAFIDYAASV | RLLIYGASTRATGIP |
| | 145) | 392) | | 394) | 395) | 396) | KGRFTISRDDSKNTLY | ARFSGSGSGTEFTLT |
| | | | | | | | LQMNSLKTEDTAVYYC | ISSLQSEDFAVYYCQ |
| | | | | | | | ARERVDWNSYFDLWGR | QYYTYPPTFGPGTKV |
| | | | | | | | GTLVTVSS (SEQ ID | DIK (SEQ ID NO: |
| | | | | | | | NO: 609) | 610) |
| 80. | FTFDDY | SAISGS | CAKDLGW | QASQDI | SNLEA | QQSYST | EVQLLESGGGLVQPGG | DIQMTQSPSSLSASV |
| | AMH | GGSTYY | VPAALDYW | SNHLN | (SEQ | PLT | SLRLSCAASGFTFDDY | GDRVTITCQASQDIS |
| | (SEQ | A (SEQ | (SEQ ID | (SEQ | ID | (SEQ | AMHWVRQAPGKGLEWV | NHLNWYQQKPGKAPK |
| | ID NO: | ID NO: | NO: 611) | ID NO: | NO: | ID NO: | SAISGSGGSTYYADSV | LLIYDASNLEAGVPS |
| | 145) | 113) | | 612) | 613) | 440) | KGRFTISRDNSKNTLY | RFSGSGSGTDFTLTI |
| | | | | | | | LQMNSLRAEDTAVYYC | SSLQPEDFATYYCQQ |
| | | | | | | | AKDLGVVVPAALDYWG | SYSTPLTFGGGTKVE |
| | | | | | | | QGTTVTVSS (SEQ | IK (SEQ ID NO: |
| | | | | | | | ID NO: 614) | 615) |
| 81. | FAFSSH | AGTSGS | CARETYYY | RASQGI | ANLEG | QQSDIF | EVQLLESGGGLVKPGG | DIQMTQSPSSLSASV |
| | WMH | GESRDY | YYMDVW | SNYLA | (SEQ | PPT | SLRLSCAASGFAFSSH | GDRVTITCRASQGIS |
| | (SEQ | A (SEQ | (SEQ ID | (SEQ | ID | (SEQ | WMHWVRQAPGKGLEWV | NYLAWYQQKPGKAPK |
| | ID NO: | ID NO: | NO: 400) | ID NO: | NO: | ID NO: | AGTSGSGESRDYADFV | LLIYDAANLEGGVPS |
| | 398) | 399) | | 228) | 401) | 402) | KGRFTISRDDSKNTLY | RFSGSGSGTDFTLTI |
| | | | | | | | LQMNSLKTEDTAVYYC | SSLQPEDFATYYCQQ |
| | | | | | | | ARETYYYYYMDVWGKG | SDIFPPTFGQGTKVE |
| | | | | | | | TTVTVSS (SEQ ID | IK (SEQ ID NO: |
| | | | | | | | NO: 616) | 617) |
| 82. | YTFTRH | GWINVK | CARESSGW | RASQSI | SSLQS | QQSNSF | QVQLVQSGAEVKKPGA | DIQMTQSPSSLSASV |
| | WIH | TGGAGY | YGTDVW | SNYLA | (SEQ | PLT | SVKVSCKASGYTFTRH | GDRATITCRASQSIS |
| | (SEQ | A (SEQ | (SEQ ID | (SEQ | ID | (SEQ | WIHWVRQAPGQGLEWM | NYLAWYQQKPGKAPK |
| | ID NO: | ID NO: | NO: 406) | ID NO: | NO: | ID NO: | GWINVKTGGAGYAQKF | LLIYAASSLQSGVPS |
| | 404) | 405) | | 407) | 373) | 408) | QGRVTMTRDTSTSTVY | RFSGSGSGTDFTLTI |
| | | | | | | | MELSSLRSEDTAVYYC | SSLQPEDFATYYCQQ |
| | | | | | | | ARESSGWYGTDVWGQG | SNSFPLTFGGGTKVE |
| | | | | | | | TTVTVSS (SEQ ID | IK (SEQ ID NO: |
| | | | | | | | NO: 618) | 619) |
| 83. | FTFSSY | AAISYD | CARENKQW | QASQDI | NLRS | QQANSF | EVQLLESGGGLVQPGG | DIQMTQSPSSLSASV |
| | WMH | GKYKDY | LASFDYW | SNFVN | (SEQ | PVT | SLRLSCAASGFTFSSY | GDRVTITCQASQDIS |
| | (SEQ | E (SEQ | (SEQ ID | (SEQ | ID | (SEQ | WMHWVRQAPGKGLEWV | NFVNWYQQKPGKAPK |
| | ID NO: | ID NO: | NO: 411) | ID NO: | NO: | ID NO: | AAISYDGKYKDYEDSV | LLIYAANLRSGVPSR |
| | 93) | 410) | | 412) | 413) | 414) | KGRFTISRDNSKNTLY | FSGSGSGTDFTLTIS |
| | | | | | | | LQMNSLRAEDTAVYYC | SLQPEDFATYYCQQA |
| | | | | | | | ARENKQWLAS FDYWGQ | NSFPVTFGPGTKVDI |
| | | | | | | | GTLVTVSS (SEQ ID | K (SEQ ID NO: |
| | | | | | | | NO: 620) | 621) |
| 84. | GTFSSS | GWISAY | CASRVHSG | QASEHI | SSLQS | QQTDSI | QVQLVQSGAEVKKPGA | DIQMTQSPSSLSASV |
| | AIS | NGYTNY | GSYPDDYW | YNYLN | (SEQ | PIT | SVKVSCKASGGTFSSS | GDRVTITCQASEHIY |
| | (SEQ | A (SEQ | (SEQ ID | (SEQ | ID | (SEQ | AISWVRQAPGQGLEWM | NYLNWYQQKPGKAPK |
| | ID NO: | ID NO: | NO: 624) | ID NO: | NO: | ID NO: | GWISAYNGYTNYAQKF | LLIYAASSLQSGVPS |
| | 622) | 623) | | 625) | 373) | 626) | QGRVTMTRDTSTSTVY | RFSGSGSGTDFTLTI |
| | | | | | | | MELSSLRSEDTAVYYC | SSLQPEDFATYYCQQ |
| | | | | | | | ASRVHSGGSYPDDYWG | TDSIPITFGQGTKVE |
| | | | | | | | QGTLVTVSS (SEQ | IK (SEQ ID NO: |
| | | | | | | | ID NO: 627) | 628) |

[0432] In some embodiments, the antibody is linked to another antibody or therapeutic. In some embodiments, the MAdCAM antibody is linked to a PD-1 antibody or a IL-2 mutein as provided herein or that is incorporated by reference.

[0433] In some embodiments, the MAdCAM antibody comprises a sequence as shown in MAdCAM Antibody Table 1. In some embodiments, the antibody is in a scFV format as illustrated MAdCAM Antibody Table 1. In some embodiments, the antibody comprises a CDR1 from any one of clones 1-66 of MAdCAM Antibody Table 1, a CDR2 from any one of clones 1-84, and a CDR3 from any one of clones 1-66 of MAdCAM Antibody Table 1. In some embodiments, the antibody comprises a LCDR1 from any one of clones 1-66 of MAdCAM Antibody Table 1, a LCDR2 from any one of clones 1-66 of MAdCAM Antibody Table 1, and a LCDR3 from any one of clones 1-66 of MAdCAM Antibody Table 1. In some embodiments, the amino acid residues of the CDRs shown above contain mutations. In some embodiments, the CDRs contain 1, 2, 3, 4, 5, 6, 7, 8, 9, or 10 substitutions or mutations. In some embodiments, the substitution is a conservative substitution.

[0434] In some embodiments, the MAdCAM antibody has a VH region selected from any one of clones 1-84 of MAdCAM Antibody Table 2 and a VL region selected from any one of clones 1-84 as set forth in of MAdCAM Antibody Table 2. In some embodiments, the antibody comprises a CDR1 from any one of clones 1-84 of MAdCAM Antibody Table 2, a CDR2 from any one of clones 1-84, and a CDR3 from any one of clones 1-84 of MAdCAM Antibody Table 2. In some embodiments, the antibody comprises a LCDR1 from any one of clones 1-84 of MAdCAM Antibody Table 2, a LCDR2 from any one of clones 1-84 of MAdCAM Antibody Table 2, and a LCDR3 from any one of clones 1-84 of MAdCAM Antibody Table 2. In some embodiments, the amino acid residues of the CDRs shown above contain mutations. In some embodiments, the CDRs contain 1, 2, 3, 4, 5, 6, 7, 8, 9, or 10 substitutions or mutations. In some embodiments, the substitution is a conservative substitution.

[0435] In some embodiments, as provided for herein, the MAdCAM antibody, or binding fragment thereof, is linked directly or indirectly to a PD-1 antibody or binding fragment thereof.

[0436] In some embodiments, as provided for herein, the anti-desmoglein 1 antibody, anti-desmoglein 2 antibody, anti-desmoglein 3 antibody, or anti-desmoglein 4 antibody, or binding fragment thereof, is linked directly or indirectly to a PD-1 antibody or binding fragment thereof.

[0437] In some embodiments, the PD-1 antibody is selected from the following table:

PD-1 Antibody Table

| Clone | | | | | | | | |
|---|---|---|---|---|---|---|---|---|
| (scFv) | VH Seq | VK Seq | CDR1 | CDR2 | CDR3 | LCDR1 | LCDR2 | LCDR3 |
| PD1AB1 | QVQLVQSGAE | DIQMTQS | GSFTGYY | GWINPN | CARDT | QASHDID | SSLQS | QQANSLPL |
| | VKKPGASVKV | PSSLSAS | MH (SEQ | DGAIHY | VTGDF | KYLN | (SEQ | T (SEQ |
| | SCKASGGSFT | VGDRVTI | ID NO: | A (SEQ | DYW | (SEQ ID | ID | ID NO: |
| | GYYMHWVRQA | TCQASHD | 631) | ID NO: | (SEQ | NO: | NO: | 635) |
| | PGQGLEWMGW | IDKYLNW | | 632) | ID | 634) | 373) | |
| | INPNDGAIHY | YQQKPGK | | | NO: | | | |
| | AQNFQGRVTM | APKLLIY | | | 633) | | | |
| | TRDTSTSTVY | AASSLQS | | | | | | |
| | MELSSLRSED | GVPSRFS | | | | | | |
| | TAVYYCARDT | GSGSGTD | | | | | | |
| | VTGDFDYWGQ | FTLTISS | | | | | | |
| | GTLVTVSS | LQPEDFA | | | | | | |
| | (SEQ ID | TYYCQQA | | | | | | |
| | NO: 629) | NSLPLTF | | | | | | |
| | | GGGTKVE | | | | | | |
| | | IK (SEQ | | | | | | |
| | | ID NO: | | | | | | |
| | | 630) | | | | | | |
| PD1AB2 | QVQLVQSGAE | DIQMTQS | GTFSRYA | GWINPN | CAKQG | RASQSIS | STLES | QQSYSTPF |
| | VKKPGASVKV | PSSLSAS | VS (SEQ | SGGTSY | DYGGG | SWLA | (SEQ | T (SEQ |
| | SCKASGGTFS | VGDRVTI | ID NO: | A (SEQ | YYFDY | (SEQ ID | ID | ID NO: |
| | RYAVSWVRQA | TCRASQS | 638) | ID NO: | W | NO: | NO: | 642) |
| | PGQGLEWMGW | ISSWLAW | | 639) | (SEQ | 206) | 641) | |
| | INPNSGGTSY | YQQKPGK | | | ID | | | |
| | AQRFQGRVTM | APKLLIY | | | NO: | | | |
| | TRDTSTSTVY | KTSTLES | | | 640) | | | |
| | MELSSLRSED | GVPSRFS | | | | | | |
| | TAVYYCAKQG | GSGSGTD | | | | | | |
| | DYGGGYYFDY | FTLTISS | | | | | | |
| | WGQGTLVTVS | LQPEDFA | | | | | | |
| | S (SEQ ID | TYYCQQS | | | | | | |
| | NO: 636) | YSTPFTF | | | | | | |
| | | GQGTKVE | | | | | | |
| | | IK (SEQ | | | | | | |
| | | ID NO: | | | | | | |
| | | 637) | | | | | | |
| PD1AB3 | QVQLVQSGAE | DIQMTQS | GTFSSYA | GWMNPN | CARVG | RASQSIN | SSLQS | QQSYSTPF |
| | VKKPGASVKV | PSSLSAS | IS (SEQ | SGNTGY | YSYGY | NWLA | (SEQ | T (SEQ |
| | SCKASGGTFS | VGDRVTI | ID NO: | A (SEQ | GMDVW | (SEQ ID | ID | ID NO: |
| | SYAISWVRQA | TCRASQS | 88) | ID NO: | (SEQ | NO: | NO: | 642) |
| | PGQGLEWMGW | INNWLAW | | 215) | ID | 646) | 373) | |
| | MNPNSGNTGY | YQQKPGK | | | NO: | | | |
| | AQKFQGRVTM | APKLLIY | | | 645) | | | |
| | TRDTSTSTVY | AASSLQS | | | | | | |
| | MELSSLRSED | GVPSRFS | | | | | | |
| | TAVYYCARVG | GSGSGTD | | | | | | |
| | YSYGYGMDVW | FTLTISS | | | | | | |
| | GQGTTVTVSS | LQPEDFA | | | | | | |
| | (SEQ ID | TYYCQQS | | | | | | |
| | NO: 643) | YSTPFTF | | | | | | |
| | | GPGTKVD | | | | | | |
| | | IK (SEQ | | | | | | |
| | | ID NO: | | | | | | |
| | | 644) | | | | | | |
| PD1AB4 | QVQLVQSGAE | DIQMTQS | YSFTTYY | GIINPS | CASGW | QASRDIK | SSLQS | QQSYSTPP |
| | VKKPGASVKV | PSSLSAS | MH (SEQ | GGSTSY | VYW | NYLA | (SEQ | T (SEQ |
| | SCKASGYSFT | VGDRVTI | ID NO: | A (SEQ | (SEQ | (SEQ ID | ID | ID NO: |
| | TYYMHWVRQA | TCQASRD | 649) | ID NO: | ID | NO: | NO: | 652) |
| | PGQGLEWMGI | IKNYLAW | | 80) | NO: | 651) | 373) | |
| | INPSGGSTSY | YQQKPGK | | | 650) | | | |
| | AQKFQGRVTM | APKLLIY | | | | | | |
| | TRDTSTSTVY | AASSLQS | | | | | | |
| | MELSSLRSED | GVPSRFS | | | | | | |
| | TAVYYCASGW | GSGSGTD | | | | | | |
| | VYWGQGTLVT | FTLTISS | | | | | | |
| | VSS (SEQ | LQPEDFA | | | | | | |
| | ID NO: | TYYCQQS | | | | | | |
| | 647) | YSTPPTF | | | | | | |
| | | GPGTKVD | | | | | | |
| | | IK (SEQ | | | | | | |
| | | ID NO: | | | | | | |
| | | 648) | | | | | | |
| PD1AB5 | EVQLLESGGG | DIQMTQS | FTFSSYA | AAIWSD | CARGL | RASQSIS | STLQS | QQSYSTPL |
| | LVQPGGSLRL | PSSLSAS | MS (SEQ | GSHQYY | GVERG | SWLA | (SEQ | T (SEQ |
| | SCAASGFTFS | VGDRVTI | ID NO: | A (SEQ | LDYW | (SEQ ID | ID | ID NO: |
| | SYAMSWVRQA | TCRASQS | 484) | ID NO: | (SEQ | NO: | NO: | 440) |
| | PGKGLEWVAA | ISSWLAW | | 655) | ID | 206) | 431) | |
| | IWSDGSHQYY | YQQKPGK | | | NO: | | | |
| | ADSVKGRFTI | APKLLIY | | | 656) | | | |
| | SRDNSKNTLY | AASTLQS | | | | | | |
| | LQMNSLRAED | GVPSRFS | | | | | | |
| | TAVYYCARGL | GSGSGTD | | | | | | |
| | GVERGLDYWG | FTLTISS | | | | | | |
| | QGTLVTVSS | LQPEDFA | | | | | | |
| | (SEQ ID | TYYCQQS | | | | | | |
| | NO: 653) | YSTPLTF | | | | | | |
| | | GQGTKVE | | | | | | |
| | | IK (SEQ | | | | | | |
| | | ID NO: | | | | | | |
| | | 654) | | | | | | |
| PD1AB6 | EVQLLESGGG | DIQMTQS | FTFSNYP | ALISDD | CARDS | RASQSIN | SNLET | QQSYSTPL |
| | LVQPGGSLRL | PSSLSAS | MH (SEQ | GTNEHY | KFANY | NYLS | (SEQ | T (SEQ |
| | SCAASGFTFS | VGDRVTI | ID NO: | A (SEQ | YYYYD | (SEQ ID | ID | ID NO: |
| | NYPMHWVRQA | TCRASQS | 659) | ID NO: | MDVW | NO: | NO: | 440) |
| | PGKGLEWVAL | INNYLSW | | 660) | (SEQ | 662) | 502) | |
| | ISDDGTNEHY | YQQKPGK | | | ID | | | |
| | ADSVKGRFTI | APKLLIY | | | NO: | | | |
| | SRDNSKNTLY | DASNLET | | | 661) | | | |
| | LQMNSLRAED | GVPSRFS | | | | | | |
| | TAVYYCARDS | GSGSGTD | | | | | | |
| | KFANYYYYYD | FTLTISS | | | | | | |
| | MDVWGQGTTV | LQPEDFA | | | | | | |
| | TVSS (SEQ | TYYCQQS | | | | | | |
| | ID NO: | YSTPLTF | | | | | | |
| | 657) | GPGTKVD | | | | | | |
| | | IK (SEQ | | | | | | |
| | | ID NO: | | | | | | |
| | | 658) | | | | | | |
| PD1AB7 | QVQLVQSGAE | DIVMTQS | YSFTGHY | GIINPN | CARGK | RSSQSIL | STRQS | QQYYSIPV |
| | VKKPGASVKV | PDSLAVS | IH (SEQ | GGSTTY | FDFYG | YSSNNRD | (SEQ | T (SEQ |
| | SCKASGYSFT | LGERATI | ID NO: | A (SEQ | DYVTA | YLA | ID | ID NO: |
| | GHYIHWVRQA | NCRSSQS | 665) | ID NO: | FDIW | (SEQ ID | NO: | 670) |
| | PGQGLEWMGI | ILYSSNN | | 666) | (SEQ | NO: | 669) | |
| | INPNGGSTTY | RDYLAWY | | | ID | 668) | | |
| | AQKLQGRVTM | QQKPGQP | | | NO: | | | |
| | TRDTSTSTVY | PKLLIYW | | | 667) | | | |
| | MELSSLRSED | ASTRQSG | | | | | | |
| | TAVYYCARGK | VPDRFSG | | | | | | |
| | FDFYGDYVTA | SGSGTDF | | | | | | |
| | FDIWGQGTMV | TLTISSL | | | | | | |
| | TVSS (SEQ | QAEDVAV | | | | | | |
| | ID NO: | YYCQQYY | | | | | | |
| | 663) | SIPVTFG | | | | | | |
| | | GGTKVEI | | | | | | |
| | | K (SEQ | | | | | | |
| | | ID NO: | | | | | | |
| | | 664) | | | | | | |
| PD1AB8 | QVQLVQSGAE | DIQMTQS | YTFSNYD | GWMNPN | CARGA | RASQSIN | SSLQG | QQSYSFPY |
| | VKKPGASVKV | PSSLSAS | MN (SEQ | SGHTGS | FGLHL | NWLA | (SEQ | T (SEQ |
| | SCKASGYTFS | VGDRVTI | ID NO: | A (SEQ | GELSL | (SEQ ID | ID | ID NO: |
| | NYDMNWVRQA | TCRASQS | 673) | ID NO: | HYYGM | NO: | NO: | 677) |
| | PGQGLEWMGW | INNWLAW | | 674) | DVW | 646) | 676) | |
| | MNPNSGHTGS | YQQKPGK | | | (SEQ | | | |
| | APKFQGRVTM | APKLLIY | | | ID | | | |
| | TRDTSTSTVY | AASSLQG | | | NO: | | | |
| | MELSSLRSED | GVPSRFS | | | 675) | | | |
| | TAVYYCARGA | GSGSGTD | | | | | | |
| | FGLHLGELSL | FTLTISS | | | | | | |
| | HYYGMDVWGQ | LQPEDFA | | | | | | |
| | GTTVTVSS | TYYCQQS | | | | | | |
| | (SEQ ID | YSFPYTF | | | | | | |
| | NO: 671) | GQGTKLE | | | | | | |
| | | IK (SEQ | | | | | | |
| | | ID NO: | | | | | | |
| | | 672) | | | | | | |
| PD1AB9 | QVQLVQSGAE | DIQMTQS | YTFTGYY | GKIVPM | CARGP | RASQSIS | SSLQS | QQANSFPV |
| | VKKPGSSVKV | PSSLSAS | MH (SEQ | FDAANY | KWELD | RWLA | (SEQ | T (SEQ |
| | SCKASGYTFT | VGDRVTI | ID NO: | A (SEQ | TW | (SEQ ID | ID | ID NO: |
| | GYYMHWVRQA | TCRASQS | 138) | ID NO: | (SEQ | NO: | NO: | 414) |
| | PGQGLEWMGK | ISRWLAW | | 680) | ID | 294) | 373) | |
| | IVPMFDAANY | YQQKPGK | | | NO: | | | |
| | APKFQGRVTI | APKLLIY | | | 681) | | | |
| | TADESTSTAY | GASSLQS | | | | | | |
| | MELSSLRSED | GVPSRFS | | | | | | |
| | TAVYYCARGP | GSGSGTD | | | | | | |
| | KWELDTWGQG | FTLTISS | | | | | | |
| | TLVTVSS | LQPEDFA | | | | | | |
| | (SEQ ID | TYYCQQA | | | | | | |
| | NO: 678) | NSFPVTF | | | | | | |
| | | GGGTKVE | | | | | | |
| | | IK (SEQ | | | | | | |
| | | ID NO: | | | | | | |
| | | 679) | | | | | | |
| PD1AB10 | QVQLVQSGAE | DIQMTQS | YTFTGYY | GIINPS | CAKTA | RASQSIN | SSLQS | QQGYSVPL |
| | VKKPGASVKV | PSSLSAS | MH (SEQ | GGSTSY | GYDWL | SWLA | (SEQ | S (SEQ |
| | SCKASGYTFT | VGDRVTI | ID NO: | A (SEQ | PSGLG | (SEQ ID | ID | ID NO: |
| | GYYMHWVRQA | TCRASQS | 138) | ID NO: | MDVW | NO: | NO: | 686) |
| | PGQGLEWMGI | INSWLAW | | 80) | (SEQ | 685) | 373) | |
| | INPSGGSTSY | YQQKPGK | | | ID | | | |
| | AQKFQGRVTM | APKLLIY | | | NO: | | | |
| | TRDTSTSTVY | YASSLQS | | | 684) | | | |
| | MELSSLRSED | GVPSRFS | | | | | | |
| | TAVYYCAKTA | GSGSGTD | | | | | | |
| | GYDWLPSGLG | FTLTISS | | | | | | |
| | MDVWGQGTTV | LQPEDFA | | | | | | |
| | TVSS (SEQ | TYYCQQG | | | | | | |
| | ID NO: | YSVPLSF | | | | | | |
| | 682) | GQGTKLE | | | | | | |
| | | IK (SEQ | | | | | | |
| | | ID NO: | | | | | | |
| | | 683) | | | | | | |
| PD1AB11 | QVQLVQSGAE | DIQMTQS | YTFSNYG | GGIIPI | CARWR | RASQGIS | SNLET | QQSYSTPL |
| | VKKPGSSVKV | PSSLSAS | IT (SEQ | FGSTAS | SDAFD | NWLA | (SEQ | T (SEQ |
| | SCKASGYTFS | VGDRVTI | ID NO: | YA | IW | (SEQ ID | ID | ID NO: |
| | NYGITWVRQA | TCRASQG | 689) | (SEQ | (SEQ | NO: | NO: | 440) |
| | PGQGLEWMGG | ISNWLAW | | ID NO: | ID | 563) | 502) | |
| | IIPIFGSTAS | YQQKPGK | | 690) | NO: | | | |
| | YAQKFQGRVT | APKLLIY | | | 691) | | | |
| | ITADESTSTA | DASNLET | | | | | | |
| | YMELSSLRSE | GVPSRFS | | | | | | |
| | DTAVYYCARW | GSGSGTD | | | | | | |
| | RSDAFDIWGQ | FTLTISS | | | | | | |
| | GTMVTVSS | LQPEDFA | | | | | | |
| | (SEQ ID | TYYCQQS | | | | | | |
| | NO: 687) | YSTPLTF | | | | | | |
| | | GGGTKVE | | | | | | |
| | | IK (SEQ | | | | | | |
| | | ID NO: | | | | | | |
| | | 688) | | | | | | |
| PD1AB12 | QVQLVQSGAE | DIQMTQS | GTFSTYA | GWINPN | CARVN | RASQGIR | STLNS | QQSYSTPF |
| | VKKPGASVKV | PSSLSAS | IS (SEQ | SGGTNY | YDFYY | NDLG | (SEQ | T (SEQ |
| | SCKASGGTFS | VGDRVTI | ID NO: | A (SEQ | GMDVW | (SEQ ID | ID | ID NO: |
| | TYAISWVRQA | TCRASQG | 694) | ID NO: | (SEQ | NO: | NO: | 642) |
| | PGQGLEWMGW | IRNDLGW | | 315) | ID | 696) | 697) | |
| | INPNSGGTNY | YQQKPGK | | | NO: | | | |
| | AQKFQGRVTM | APKLLIY | | | 695) | | | |
| | TRDTSTSIVY | RASTLNS | | | | | | |
| | MELSSLRSED | GVPSRFS | | | | | | |
| | TAVYYCARVN | GSGSGTD | | | | | | |
| | YDFYYGMDVW | FTLTISS | | | | | | |
| | GQGTTVTVSS | LQPEDFA | | | | | | |
| | (SEQ ID | TYYCQQS | | | | | | |
| | NO: 692) | YSTPFTF | | | | | | |
| | | GPGTKVD | | | | | | |
| | | IK (SEQ | | | | | | |
| | | ID NO: | | | | | | |
| | | 693) | | | | | | |
| PD1AB13 | QVQLVQSGAE | DIQMTQS | GTFSTYA | GWINPN | CARVN | RASQGIR | STLNS | QQSYSTPF |
| | VKKPGASVKV | PSSLSAS | IS (SEQ | SGGTNY | YDFYY | NDLG | (SEQ | T (SEQ |
| | SCKASGGTFS | VGDRVTI | ID NO: | A (SEQ | GMDVW | (SEQ ID | ID | ID NO: |
| | TYAISWVRQA | TCRASQG | 694) | ID NO: | (SEQ | NO: | NO: | 642) |
| | PGQGLEWMGW | IRNDLGW | | 315) | ID | 696) | 697) | |
| | INPNSGGTNY | YQQKPGK | | | NO: | | | |
| | AQKFQGRVTM | APKLLIY | | | 695) | | | |
| | TRDTSTSTVY | RASTLNS | | | | | | |
| | MELSSLRSED | GVPSRFS | | | | | | |
| | TAVYYCARVN | GSGSGTD | | | | | | |
| | YDFYYGMDVW | FTLTISS | | | | | | |
| | GQGTTVTVSS | LQPEDFA | | | | | | |
| | (SEQ ID | TYYCQQS | | | | | | |
| | NO: 698) | YSTPFTF | | | | | | |
| | | GPGTKVD | | | | | | |
| | | IK (SEQ | | | | | | |
| | | ID NO: | | | | | | |
| | | 693) | | | | | | |
| PD1AB14 | EVQLLESGGG | DIQMTQS | FSFSSYD | SGISGS | CASPY | RASQDIA | SSVQT | QQSYTTPY |
| | LVQPGGSLRL | PSSLSAS | MS (SEQ | GSSTYY | GMGYM | NYLA | (SEQ | T (SEQ |
| | SCAASGFSFS | VGDRVTI | ID NO: | A (SEQ | DVW | (SEQ ID | ID | ID NO: |
| | SYDMSWVRQA | TCRASQD | 701) | ID NO: | (SEQ | NO: | NO: | 706) |
| | PGKGLEWVSG | IANYLAW | | 702) | ID | 704) | 705) | |
| | ISGSGSSTYY | YQQKPGK | | | NO: | | | |
| | ADSVKGRFTI | APKLLIY | | | 703) | | | |
| | SRDNSKNTLY | GASSVQT | | | | | | |
| | LQMNSLRAED | GVPSRFS | | | | | | |
| | TAVYYCASPY | GSGSGTD | | | | | | |
| | GMGYMDVWGK | FTLTISS | | | | | | |
| | GTTVTVSS | LQPEDFA | | | | | | |
| | (SEQ ID | TYYCQQS | | | | | | |
| | NO: 699) | YTTPYTF | | | | | | |
| | | GQGTRLE | | | | | | |
| | | IK (SEQ | | | | | | |
| | | ID NO: | | | | | | |
| | | 700) | | | | | | |
| PD1AB15 | QVQLVQSGAE | DIQMTQS | GSFNNYA | GWINPN | CARVS | QASQDIS | SNLQS | QQSYSTPF |
| | VKKPGASVKV | PSSLSAS | IS (SEQ | TGGTSY | YGVGY | RYLN | (SEQ | T (SEQ |
| | SCKASGGSFN | VGDRVTI | ID NO: | A (SEQ | YMDVW | (SEQ ID | ID | ID NO: |
| | NYAISWVRQA | TCQASQD | 709) | ID NO: | (SEQ | NO: | NO: | 642) |
| | PGQGLEWMGW | ISRYLNW | | 710) | ID | 712) | 478) | |
| | INPNTGGTSY | YQQKPGK | | | NO: | | | |
| | AQKFQGRVTM | APKLLIY | | | 711) | | | |
| | TRDTSTSTVY | AASNLQS | | | | | | |
| | MELSSLRSED | GVPSRFS | | | | | | |
| | TAVYYCARVS | GSGSGTD | | | | | | |
| | YGVGYYMDVW | FTLTISS | | | | | | |
| | GKGTTVTVSS | LQPEDFA | | | | | | |
| | (SEQ ID | TYYCQQS | | | | | | |
| | NO: 707) | YSTPFTF | | | | | | |
| | | GPGTKVD | | | | | | |
| | | IK (SEQ | | | | | | |
| | | ID NO: | | | | | | |
| | | 708) | | | | | | |
| PD1AB16 | QVQLVQSGAE | DIQMTQS | GSFNNYA | GWINPN | CARVS | QASQDIS | SNLQS | QQSYSTPF |
| | VKKPGASVKV | PSSLSAS | IS (SEQ | TGGTSY | YGVGY | RYLN | (SEQ | T (SEQ |
| | SCKASGGSFN | VGDRVTI | ID NO: | A (SEQ | YMDVW | (SEQ ID | ID | ID NO: |
| | NYAISWVRQA | TCQASQD | 709) | ID NO: | (SEQ | NO: | NO: | 642) |
| | PGQGLEWMGW | ISRYLNW | | 710) | ID | 712) | 478) | |
| | INPNTGGTSY | YQQKPGK | | | NO: | | | |
| | AQKFQGRVTM | APKLLIY | | | 711) | | | |
| | TRDTSTSTVY | AASNLQS | | | | | | |
| | MELSSLRSED | GVPSRFS | | | | | | |
| | TAVYYCARVS | GSGSGTD | | | | | | |
| | YGVGYYMDVW | STLTISS | | | | | | |
| | GKGTTVTVSS | LQPEDFA | | | | | | |
| | (SEQ ID | TYYCQQS | | | | | | |
| | NO: 707) | YSTPFTF | | | | | | |
| | | GPGTKVD | | | | | | |
| | | IK (SEQ | | | | | | |
| | | ID NO: | | | | | | |
| | | 713) | | | | | | |
| PD1AB17 | QVQLVQSGAE | DIQMTQS | YTFTDDY | GWMNTN | CARGG | RASQGVG | SSLQS | QQAYSFPW |
| | VKKPGASVKV | PSSLSAS | IH (SEQ | SGNTGY | SYSSG | NALG | (SEQ | T (SEQ |
| | SCKASGYTFT | VGDRVTI | ID NO: | A (SEQ | WYGRL | (SEQ ID | ID | ID NO: |
| | DDYIHWVRQA | TCRASQG | 716) | ID NO: | DYYYG | NO: | NO: | 432) |
| | PGQGLEWMGW | VGNALGW | | 717) | MDVW | 719) | 373) | |
| | MNTNSGNTGY | YQQKPGK | | | (SEQ | | | |
| | AQKFQGRVTM | APKLLIY | | | ID | | | |
| | TRDTSTSTVY | AASSLQS | | | NO: | | | |
| | MELSSLRSED | GVPSRFS | | | 718) | | | |
| | TAVYYCARGG | GSGSGTD | | | | | | |
| | SYSSGWYGRL | FTLTISS | | | | | | |
| | DYYYGMDVWG | LQPEDFA | | | | | | |
| | QGTTVTVSS | TYYCQQA | | | | | | |
| | (SEQ ID | YSFPWTF | | | | | | |
| | NO: 714) | GQGTKLE | | | | | | |
| | | IK (SEQ | | | | | | |
| | | ID NO: | | | | | | |
| | | 715) | | | | | | |
| PD1AB18 | QVQLVQSGAE | DIQMTQS | YTFTDYA | GWLNPN | CAAGL | RASQSIN | SSLES | QQSYSIPI |
| | VKKPGASVKV | PSSLSAS | MH (SEQ | SGNTGY | FIW | RWLA | (SEQ | T (SEQ |
| | SCKASGYTFT | VGDRVTI | ID NO: | A (SEQ | (SEQ | (SEQ ID | ID | ID NO: |
| | DYAMHWVRQA | TCRASQS | 722) | ID NO: | ID | NO: | NO: | 727) |
| | PGQGLEWMGW | INRWLAW | | 723) | NO: | 725) | 726) | |
| | LNPNSGNTGY | YQQKPGK | | | 724) | | | |
| | APKFQGRVTM | APKLLIY | | | | | | |
| | TRDTSTSTVY | DASSLES | | | | | | |
| | MELSSLRSED | GVPSRFS | | | | | | |
| | TAVYYCAAGL | GSGSGTD | | | | | | |
| | FIWGQGTMVT | FTLTISS | | | | | | |
| | VSS (SEQ | LQPEDFA | | | | | | |
| | ID NO: | TYYCQQS | | | | | | |
| | 720) | YSIPITF | | | | | | |
| | | GQGTRLE | | | | | | |
| | | IK (SEQ | | | | | | |
| | | ID NO: | | | | | | |
| | | 721) | | | | | | |
| PD1AB19 | QVQLVQSGAE | DIVMTQS | GTFSSYA | GGIIPG | CTTEY | RSSQSLL | SNRAP | MQALQTPL |
| | VKKPGSSVKV | PLSLPVT | IS (SEQ | FGSPNY | CSSTS | HSNGYNY | (SEQ | T (SEQ |
| | SCKASGGTFS | PGEPAS1 | ID NO: | A (SEQ | CSDYW | LD (SEQ | ID | ID NO: |
| | SYAISWVRQA | SCRSSQS | 88) | ID NO: | (SEQ | ID NO: | NO: | 733) |
| | PGQGLEWMGG | LLHSNGY | | 730) | ID | 141) | 732) | |
| | IIPGFGSPNY | NYLDWYL | | | NO: | | | |
| | APNFQGRVTI | QKPGQSP | | | 731) | | | |
| | TADESTSTAY | QLLIY [symbol] G | | | | | | |
| | MELSSLRSED | SNRAPGV | | | | | | |
| | TAVYYCTTEY | PDRFSGS | | | | | | |
| | CSSTSCSDYW | GSGTDFT | | | | | | |
| | GQGTLVTVSS | LKISRVE | | | | | | |
| | (SEQ ID | AEDVGVY | | | | | | |
| | NO: 728) | YCMQALQ | | | | | | |
| | | TPLTFGQ | | | | | | |
| | | GTKVEIK | | | | | | |
| | | (SEQ ID | | | | | | |
| | | NO: | | | | | | |
| | | 729) | | | | | | |
| PD1AB20 | QVQLVQSGAE | DIQMTQS | YTFSDHY | GTINPS | CAADN | RASQSIS | STLQS | QQSHSLPL |
| | VKKPGASVKV | PSSLSAS | MH (SEQ | GGRTSY | GHASG | NWVA | (SEQ | T (SEQ |
| | SCKASGYTFS | VGDRVTI | ID NO: | A (SEQ | WLYYY | (SEQ ID | ID | ID NO: |
| | DHYMHWVRQA | TCRASQS | 736) | ID NO: | GMDVW | NO: | NO: | 740) |
| | PGQGLEWMGT | ISNWVAW | | 737) | (SEQ | 739) | 431) | |
| | INPSGGRTSY | YQQKPGK | | | ID | | | |
| | AQKFQGRVTM | APKLLIY | | | NO: | | | |
| | TRDTSTSTVY | RASTLQS | | | 738) | | | |
| | MELSSLRSED | GVPSRFS | | | | | | |
| | TAVYYCAADN | GSGSGTD | | | | | | |
| | GHASGWLYYY | FTLTISS | | | | | | |
| | GMDVWGQGTT | LQPEDFA | | | | | | |
| | VTVSS (SEQ | TYYCQQS | | | | | | |
| | ID NO: | HSLPLTF | | | | | | |
| | 734) | GPGTKVD | | | | | | |
| | | IK (SEQ | | | | | | |
| | | ID NO: | | | | | | |
| | | 735) | | | | | | |
| PD1AB21 | EVQLLESGGG | DIQMTQS | FTFSSYA | SGISGG | CASEY | RASQSIS | SSLQS | QQYRNFPY |
| | LVQPGGSLRL | PSSLSAS | MS (SEQ | GGTTYY | YGMDV | GWLA | (SEQ | T (SEQ |
| | SCAASGFTFS | VGDRVTI | ID NO: | A (SEQ | W | (SEQ ID | ID | ID NO: |
| | SYAMSWVRQA | TCRASQS | 484) | ID NO: | (SEQ | NO: | NO: | 746) |
| | PGKGLEWVSG | ISGWLAW | | 743) | ID | 745) | 373) | |
| | ISGGGGTTYY | YQQKPGK | | | NO: | | | |
| | ADSVKGRFTI | APKLLIY | | | 744) | | | |
| | SRDNSKNTLY | AASSLQS | | | | | | |
| | LQMNSLRAED | GVPSRFS | | | | | | |
| | TAVYYCASEY | GSGSGTD | | | | | | |
| | YGMDVWGQGT | FTLTISS | | | | | | |
| | TVTVSS | LQPEDFA | | | | | | |
| | (SEQ ID | TYYCQQY | | | | | | |
| | NO: 741) | RNFPYTF | | | | | | |
| | | GQGTKLE | | | | | | |
| | | IK (SEQ | | | | | | |
| | | ID NO: | | | | | | |
| | | 742) | | | | | | |
| PD1AB22 | QVQLVQSGAE | EIVMTQS | YTFSGYY | GVINPS | CAEGF | RASQGVG | STRAT | QQYYTTPI |
| | VKKPGASVKV | PATLSVS | MH (SEQ | GGSTSY | DYW | RSLA | (SEQ | T (SEQ |
| | SCKASGYTFS | PGERATL | ID NO: | A (SEQ | (SEQ | (SEQ ID | ID | ID NO: |
| | GYYMHWVRQA | SCRASQG | 749) | ID NO: | ID | NO: | NO: | 753) |
| | PGQGLEWMGV | VGRSLAW | | 750) | NO: | 752) | 395) | |
| | INPSGGSTSY | YQQKPGQ | | | 751) | | | |
| | AQKFQGRVTM | APRLLIY | | | | | | |
| | TRDTSTSTVY | GASTRAT | | | | | | |
| | MELSSLRSED | GIPARFS | | | | | | |
| | TAVYYCAEGF | GSGSGTE | | | | | | |
| | DYWGQGTLVT | FTLTISS | | | | | | |
| | VSS (SEQ | LQSEDFA | | | | | | |
| | ID NO: | VYYCQQY | | | | | | |
| | 747) | YTTPITF | | | | | | |
| | | GQGTRLE | | | | | | |
| | | IK (SEQ | | | | | | |
| | | ID NO: | | | | | | |
| | | 748) | | | | | | |
| PD1AB23 | QVQLVQSGAE | DIQMTQS | GTFSNYA | GWMNPN | CARVN | QASQDIS | STLKS | QQADNLPF |
| | VKKPGASVKV | PSSLSAS | IS (SEQ | SGNTGY | YYYYY | NYLN | (SEQ | T (SEQ |
| | SCKASGGTFS | VGDRVTI | ID NO: | A (SEQ | GMDVW | (SEQ ID | ID | ID NO: |
| | NYAISWVRQA | TCQASQD | 756) | ID NO: | (SEQ | NO: | NO: | 759) |
| | PGQGLEWMGW | ISNYLNW | | 215) | ID | 148) | 758) | |
| | MNPNSGNTGY | YQQKPGK | | | NO: | | | |
| | AQKFQGRVTM | APKLLIY | | | 757) | | | |
| | TRDTSTSTVY | KASTLKS | | | | | | |
| | MELSSLRSED | GVPSRFS | | | | | | |
| | TAVYYCARVN | GSGSGTD | | | | | | |
| | YYYYYGMDVW | FTLTISS | | | | | | |
| | GQGTTVTVSS | LQPEDFA | | | | | | |
| | (SEQ ID | TYYCQQA | | | | | | |
| | NO: 754) | DNLPFTF | | | | | | |
| | | GPGTKVD | | | | | | |
| | | IK (SEQ | | | | | | |
| | | ID NO: | | | | | | |
| | | 755) | | | | | | |
| PD1AB24 | QVQLVQSGAE | DIQMTQS | YTFTNYY | GIINPS | CARDW | QASRDIS | SSLQS | QQANSFPP |
| | VKKPGASVKV | PSSLSAS | MH (SEQ | GGSTSY | GWDYY | NYLN | (SEQ | T (SEQ |
| | SCKASGYTFT | VGDRVTI | ID NO: | A (SEQ | YYGMD | (SEQ ID | ID | ID NO: |
| | NYYMHWVRQA | TCQASRD | 158) | ID NO: | VW | NO: | NO: | 764) |
| | PGQGLEWMGI | ISNYLNW | | 80) | (SEQ | 763) | 373) | |
| | INPSGGSTSY | YQQKPGK | | | ID | | | |
| | AQRFQGRVTM | APKLLIY | | | NO: | | | |
| | TRDTSTSTVY | AASSLQS | | | 762) | | | |
| | MELSSLRSED | GVPSRFS | | | | | | |
| | TAVYYCARDW | GSGSGTD | | | | | | |
| | GWDYYYYGMD | FTLTISS | | | | | | |
| | VWGQGTTVTV | LQPEDFA | | | | | | |
| | SS (SEQ ID | TYYCQQA | | | | | | |
| | NO: 760) | NSFPPTF | | | | | | |
| | | GQGTKLE | | | | | | |
| | | IK (SEQ | | | | | | |
| | | ID NO: | | | | | | |
| | | 761) | | | | | | |
| PD1AB25 | EVQLLESGGG | DIVMTQS | FTFSNSD | SGITIS | CARGR | KSSQSVL | STRES | QQYYTTPP |
| | LVQPGGSLRL | PDSLAVS | MS (SEQ | GGSTYY | GGSGW | YSPNNKN | (SEQ | T (SEQ |
| | SCAASGFTFS | LGERATI | ID NO: | A (SEQ | LDYW | YLA | ID | ID NO: |
| | NSDMSWVRQA | NCKSSQS | 767) | ID NO: | (SEQ | (SEQ ID | NO: | 771) |
| | PGKGLEWVSG | VLYSPNN | | 768) | ID | NO: | 389) | |
| | ITISGGSTYY | KNYLAWY | | | NO: | 770) | | |
| | ADSVRGRFTI | QQKPGQP | | | 769) | | | |
| | SRDNSKNTLY | PKLLIYW | | | | | | |
| | LQMSSLRAED | ASTRESG | | | | | | |
| | TAVYYCARGR | VPDRFSG | | | | | | |
| | GGSGWLDYWG | SGSGTDF | | | | | | |
| | QGTLVTVSS | TLTISSL | | | | | | |
| | (SEQ ID | QAEDVAV | | | | | | |
| | NO: 765) | YYCQQYY | | | | | | |
| | | TTPPTFG | | | | | | |
| | | QGTRLEI | | | | | | |
| | | K (SEQ | | | | | | |
| | | ID NO: | | | | | | |
| | | 766) | | | | | | |
| PD1AB26 | QVQLVQSGAE | DIQMTQS | YTFTGYY | GKIVPM | CARGP | RASQSIS | SSLQS | QQANSFPV |
| | VKKPGSSVKV | PSSLSAS | MH (SEQ | FDAANY | KWELD | RWLA | (SEQ | T (SEQ |
| | SCKASGYTFT | VGDRVTI | ID NO: | A (SEQ | TW | (SEQ ID | ID | ID NO: |
| | GYYMHWVRQA | TCRASQS | 138) | ID NO: | (SEQ | NO: | NO: | 414) |
| | PGQGLEWMGK | ISRWLAW | | 680) | ID | 294) | 373) | |
| | IVPMFDAANY | YQQKPGK | | | NO: | | | |
| | APKFQGRVTI | APKLLIY | | | 681) | | | |
| | TADESTSTAY | GASSLQS | | | | | | |
| | MELSSLRSED | GVPSRFS | | | | | | |
| | TAVYYCARGP | GSGSGTD | | | | | | |
| | KWELDTWGQG | FTLTISS | | | | | | |
| | TLVTVSS | LQPEDFA | | | | | | |
| | (SEQ ID | TYYCQQA | | | | | | |
| | NO: 678) | NSFPVTF | | | | | | |
| | | GGGTKVD | | | | | | |
| | | IK (SEQ | | | | | | |
| | | ID NO: | | | | | | |
| | | 772) | | | | | | |
| PD1AB27 | QVQLVQSGAE | DIQMTQS | YTFTGYY | GKIVPM | CARGP | RASQSIS | SSLQS | QQANSFPV |
| | VKKPGSSVKV | PSSLSAS | MH (SEQ | FDAANY | KWELD | RWLA | (SEQ | T (SEQ |
| | SCKASGYTFT | VGDRVTI | ID NO: | A (SEQ | TW | (SEQ ID | ID | ID NO: |
| | GYYMHWVRQA | TCRASQS | 138) | ID NO: | (SEQ | NO: | NO: | 414) |
| | PGQGLEWMGK | ISRWLAW | | 680) | ID | 294) | 373) | |
| | IVPMFDAANY | YQQKPGK | | | NO: | | | |
| | APKFQGRVTI | APKLLIY | | | 681) | | | |
| | TADESTSTAY | GASSLQS | | | | | | |
| | MELSSLRSED | GVPSRFS | | | | | | |
| | TAVYYCARGP | GSGSGTD | | | | | | |
| | KWELDTWGQG | FTFTISS | | | | | | |
| | TLVTVSS | LQPEDFA | | | | | | |
| | (SEQ ID | TYYCQQA | | | | | | |
| | NO: 678) | NSFPVTF | | | | | | |
| | | GGGTKVD | | | | | | |
| | | IK (SEQ | | | | | | |
| | | ID NO: | | | | | | |
| | | 773) | | | | | | |
| PD1AB28 | QVQLVQSGAE | DIQMTQS | GDFSNYF | GWINPH | CARGG | RASQSIS | STLQS | QQSYSTPF |
| | VKKPGSSVKV | PSSLSAS | VS (SEQ | NGDTMY | YSYGY | TWLA | (SEQ | T (SEQ |
| | SCKASGGDFS | VGDRVTI | ID NO: | A (SEQ | TFDIW | (SEQ ID | ID | ID NO: |
| | NYFVSWVRQA | TCRASQS | 776) | ID NO: | (SEQ | NO: | NO: | 642) |
| | PGQGLEWMGW | ISTWLAW | | 777) | ID | 384) | 431) | |
| | INPHNGDTMY | YQQKPGK | | | NO: | | | |
| | AQKFQGRVTI | APKLLIY | | | 778) | | | |
| | TADESTSTAY | AASTLQS | | | | | | |
| | MELSSLRSED | GVPSRFS | | | | | | |
| | TAVYYCARGG | GSGSGTD | | | | | | |
| | YSYGYTFDIW | FTLTISS | | | | | | |
| | GQGTMVTVSS | LQPEDFA | | | | | | |
| | (SEQ ID | TYYCQQS | | | | | | |
| | NO: 774) | YSTPFTF | | | | | | |
| | | GGGTKVE | | | | | | |
| | | IK (SEQ | | | | | | |
| | | ID NO: | | | | | | |
| | | 775) | | | | | | |
| PD1AB29 | EVQLLESGGG | DIVMTQS | FTFSNSD | SGITIS | CARGR | KSSQSVL | STRES | QQYYITPP |
| | LVQPGGSLRL | PDSLAVS | MS (SEQ | GGSTYY | GGSGW | YSPNNKN | (SEQ | T (SEQ |
| | SCAASGFTFS | LGERATI | ID NO: | A (SEQ | LDYW | YLA | ID | ID NO: |
| | NSDMSWVRQA | NCKSSQS | 767) | ID NO: | (SEQ | (SEQ ID | NO: | 781) |
| | PGKGLEWVSG | VLYSPNN | | 768) | ID | NO: | 389) | |
| | ITISGGSTYY | KNYLAWY | | | NO: | 770) | | |
| | ADSVKGRFTI | QQKPGQP | | | 769) | | | |
| | SRDNSKNTLY | PKLLIYW | | | | | | |
| | LQMNSLRAED | ASTRESG | | | | | | |
| | TAVYYCARGR | VPDRFSG | | | | | | |
| | GGSGWLDYWG | SGSGTDF | | | | | | |
| | QGTLVTVSS | TLTISSL | | | | | | |
| | (SEQ ID | QAEDVAV | | | | | | |
| | NO: 779) | YYCQQYY | | | | | | |
| | | ITPPTFG | | | | | | |
| | | QGTRLEI | | | | | | |
| | | K (SEQ | | | | | | |
| | | ID NO: | | | | | | |
| | | 780) | | | | | | |
| PD1AB30 | EVQLLESGGG | DIVMTQS | FTFSNSD | SGITIS | CARGR | KSSQSVL | STRES | QQYYTTPP |
| | LVQPGGSLRL | PDSLAVS | MS (SEQ | GGSTYY | GGSGW | YSPNNKN | (SEQ | T (SEQ |
| | SCAASGFTFS | LGERATI | ID NO: | A (SEQ | LDYW | YLA | ID | ID NO: |
| | NSDMSWVRQA | NCKSSQS | 767) | ID NO: | (SEQ | (SEQ ID | NO: | 771) |
| | PGKGLEWVSG | VLYSPNN | | 768) | ID | NO: | 389) | |
| | ITISGGSTYY | KNYLAWY | | | NO: | 770) | | |
| | ADSVKGRFTI | QQKPGQP | | | 769) | | | |
| | SRDNSKNTLY | PKLLIYW | | | | | | |
| | LQMNSLRAED | ASTRESG | | | | | | |
| | TAVYYCARGR | VPDRFSG | | | | | | |
| | GGSGWLDYWG | SGSGTDF | | | | | | |
| | QGTLVTVSS | TLTISSL | | | | | | |
| | (SEQ ID | QAEDVAV | | | | | | |
| | NO: 779) | YYCQQYY | | | | | | |
| | | TTPPTFG | | | | | | |
| | | QGTRLEI | | | | | | |
| | | K (SEQ | | | | | | |
| | | ID NO: | | | | | | |
| | | 766) | | | | | | |
| PD1AB31 | QVQLVQSGAE | EIVMTQS | HTFTDYY | GIINPS | CASGW | RASQSVS | SSRAT | QQYTTSPI |
| | VKKPGSSVKV | PATLSVS | MH (SEQ | GGSTSY | TDW | SYLA | (SEQ | T (SEQ |
| | SCKASGHTFT | PGERATL | ID NO: | A (SEQ | (SEQ | (SEQ ID | ID | ID NO: |
| | DYYMHWVRQA | SCRASQS | 784) | ID NO: | ID | NO: | NO: | 788) |
| | PGQGLEWMGI | VSSYLAW | | 80) | NO: | 786) | 787) | |
| | INPSGGSTSY | YQQKPGQ | | | 785) | | | |
| | AQKFQGRVTI | APRLLIY | | | | | | |
| | TADESTSTAY | GTSSRAT | | | | | | |
| | MELSSLRSED | GIPARFS | | | | | | |
| | TAVYYCASGW | GSGSGTE | | | | | | |
| | TDWGQGTLVT | FTLTISS | | | | | | |
| | VSS (SEQ | LQSEDFA | | | | | | |
| | ID NO: | VYYCQQY | | | | | | |
| | 782) | TTSPITF | | | | | | |
| | | GQGTRLE | | | | | | |
| | | IKR | | | | | | |
| | | (SEQ ID | | | | | | |
| | | NO: | | | | | | |
| | | 783) | | | | | | |
| PD1AB32 | QVQLVQSGAE | DIQMTQS | YTFTDYY | GGIFPV | CARDH | QASQDIS | KDLHP | QESFSTLT |
| | VKKPGASVKV | PSSLSAS | MH (SEQ | FGSSTY | GSGLD | NYLN | (SEQ | (SEQ ID |
| | SCKASGYTFT | VGDRVTI | ID NO: | A (SEQ | VW | (SEQ ID | ID | NO: 795) |
| | DYYMHWVRQA | TCQASQD | 791) | ID NO: | (SEQ | NO: | NO: | |
| | PGQGLEWMGG | ISNYLNW | | 792) | ID | 148) | 794) | |
| | IFPVFGSSTY | YQQKPGK | | | NO: | | | |
| | AQKFQGRVTM | APKLLIY | | | 793) | | | |
| | TRDTSTSTVY | DAKDLHP | | | | | | |
| | MELSSLRSED | GVPSRFS | | | | | | |
| | TAVYYCARDH | GSGSGTD | | | | | | |
| | GSGLDVWGQG | FTLTISS | | | | | | |
| | TTVTVSS | LQPEDFA | | | | | | |
| | (SEQ ID | TYYCQES | | | | | | |
| | NO: 789) | FSTLTFG | | | | | | |
| | | QGTKVEI | | | | | | |
| | | KR (SEQ | | | | | | |
| | | ID NO: | | | | | | |
| | | 790) | | | | | | |
| PD1AB33 | QVQLVQSGAE | DIQMTQS | YSFTTYY | GIIAPS | CASGW | QASRDIK | SSLQS | QQSYSTPP |
| | VKKPGASVKV | PSSLSAS | MH (SEQ | GGSTSY | VYW | NYLA | (SEQ | T (SEQ |
| | SCKASGYSFT | VGDRVTI | ID NO: | A (SEQ | (SEQ | (SEQ ID | ID | ID NO: |
| | TYYMHWVRQA | TCQASRD | 649) | ID NO: | ID | NO: | NO: | 652) |
| | PGQGLEWMGI | IKNYLAW | | 797) | NO: | 651) | 373) | |
| | IAPSGGSTSY | YQQKPGK | | | 650) | | | |
| | AQKFQGRVTM | APKLLIY | | | | | | |
| | TRDTSTSTVY | AASSLQS | | | | | | |
| | MELSSLRSED | GVPSRFS | | | | | | |
| | TAVYYCASGW | GSGSGTD | | | | | | |
| | VYWGQGTLVT | FTLTISS | | | | | | |
| | VSS (SEQ | LQPEDFA | | | | | | |
| | ID NO: | TYYCQQS | | | | | | |
| | 796) | YSTPPTF | | | | | | |
| | | GPGTKVD | | | | | | |
| | | IK (SEQ | | | | | | |
| | | ID NO: | | | | | | |
| | | 648) | | | | | | |
| PD1AB34 | QVQLVQSGAE | DIQMTQS | YSFTTYY | GIIAPS | CASGW | QASRDIK | SSLQS | QQSYSTPP |
| | VKKPGASVKV | PSSLSAS | MH (SEQ | GGSTSY | VYW | NYLA | (SEQ | T (SEQ |
| | SCKASGYSFT | VGDRVTI | ID NO: | A (SEQ | (SEQ | (SEQ ID | ID | ID NO: |
| | TYYMHWVRQA | TCQASRD | 649) | ID NO: | ID | NO: | NO: | 652) |
| | PGQGLEWMGI | IKNYLAW | | 797) | NO: | 651) | 373) | |
| | IGPSGGSTSY | YQQKPGK | | | 650) | | | |
| | AQKFQGRVTM | APKLLIY | | | | | | |
| | TRDTSTSTVY | AASSLQS | | | | | | |
| | MELSSLRSED | GVPSRFS | | | | | | |
| | TAVYYCASGW | GSGSGTD | | | | | | |
| | VYWGQGTLVT | FTLTISS | | | | | | |
| | VSS (SEQ | LQPEDFA | | | | | | |
| | ID NO: | TYYCQQS | | | | | | |
| | 798) | YSTPPTF | | | | | | |
| | | GPGTKVD | | | | | | |
| | | IK (SEQ | | | | | | |
| | | ID NO: | | | | | | |
| | | 648) | | | | | | |
| PD1AB35 | QVQLVQSGAE | DIQMTQS | YTFSDHY | GTIAPS | CAADN | RASQSIS | STLQS | QQSHSLPL |
| | VKKPGASVKV | PSSLSAS | MH (SEQ | GGRTSY | GHASG | NWVA | (SEQ | T (SEQ |
| | SCKASGYTFS | VGDRVTI | ID NO: | A (SEQ | WLYYY | (SEQ ID | ID | ID NO: |
| | DHYMHWVRQA | TCRASQS | 736) | ID NO: | GMDVW | NO: | NO: | 740) |
| | PGQGLEWMGT | ISNWVAW | | 800) | (SEQ | 739) | 431) | |
| | IAPSGGRTSY | YQQKPGK | | | ID | | | |
| | AQKFQGRVTM | APKLLIY | | | NO: | | | |
| | TRDTSTSTVY | RASTLQS | | | 738) | | | |
| | MELSSLRSED | GVPSRFS | | | | | | |
| | TAVYYCAADN | GSGSGTD | | | | | | |
| | GHASGWLYYY | FTLTISS | | | | | | |
| | GMDVWGQGTT | LQPEDFA | | | | | | |
| | VTVSS (SEQ | TYYCQQS | | | | | | |
| | ID NO: | HSLPLTF | | | | | | |
| | 799) | GPGTKVD | | | | | | |
| | | IK (SEQ | | | | | | |
| | | ID NO: | | | | | | |
| | | 735) | | | | | | |
| PD1AB36 | QVQLVQSGAE | DIQMTQS | YTFSDHY | GTIAPS | CAADN | RASQSIS | STLQS | QQSHSLPL |
| | VKKPGASVKV | PSSLSAS | MH (SEQ | GGRTSY | GHASG | NWVA | (SEQ | T (SEQ |
| | SCKASGYTFS | VGDRVTI | ID NO: | A (SEQ | WLYYY | (SEQ ID | ID | ID NO: |
| | DHYMHWVRQA | TCRASQS | 736) | ID NO: | GMDVW | NO: | NO: | 740) |
| | PGQGLEWMGT | ISNWVAW | | 800) | (SEQ | 739) | 431) | |
| | IGPSGGRTSY | YQQKPGK | | | ID | | | |
| | AQKFQGRVTM | APKLLIY | | | NO: | | | |
| | TRDTSTSTVY | RASTLQS | | | 738) | | | |
| | MELSSLRSED | GVPSRFS | | | | | | |
| | TAVYYCAADN | GSGSGTD | | | | | | |
| | GHASGWLYYY | FTLTISS | | | | | | |
| | GMDVWGQGTT | LQPEDFA | | | | | | |
| | VTVSS (SEQ | TYYCQQS | | | | | | |
| | ID NO: | HSLPLTF | | | | | | |
| | 801) | GPGTKVD | | | | | | |
| | | IK (SEQ | | | | | | |
| | | ID NO: | | | | | | |
| | | 735) | | | | | | |

[0438] In some embodiments, the antibody is linked to another antibody or therapeutic. In some embodiments, the PD-1 antibody is linked to an anti-desmoglein 1 antibody, an anti-desmoglein 2 antibody, an anti-desmoglein 3 antibody, or an anti-desmoglein 4 antibody or a IL-2 mutein as provided herein or that is incorporated by reference.

[0439] In some embodiments, the PD-1 antibody comprises a sequence as shown in PD-1 Antibody Table. In some embodiments, the antibody is in a scFV format as illustrated in the PD-1 Antibody Table. In some embodiments, the antibody comprises a CDR1 from any one of clones of the PD-1 Antibody Table, a CDR2 from any one of clones of the PD-1 Antibody Table, and a CDR3 from any one of clones of the PD-1 Antibody Table. In some embodiments, the antibody comprises a LCDR1 from any one of clones of the PD-1 Antibody Table, a LCDR2 from any one of clones of the PD-1 Antibody Table, and a LCDR3 from any one of clones of the PD-1 Antibody Table. In some embodiments, the amino acid residues of the CDRs shown above contain mutations. In some embodiments, the CDRs contain 1, 2, 3, 4, 5, 6, 7, 8, 9, or 10 substitutions or mutations. In some embodiments, the substitution is a conservative substitution.

[0440] In some embodiments, the PD-1 antibody has a VH region selected from any one of clones of the PD-1 Antibody Table and a VL region selected from any one of clones as set forth in the PD-1 Antibody Table.

[0441] In some embodiments, as provided for herein, the PD-1 antibody, or binding fragment thereof, is linked directly or indirectly to an anti-desmoglein 1 antibody, an anti-desmoglein 2 antibody, an anti-desmoglein 3 antibody, or an anti-desmoglein 4 antibody or binding fragment thereof. Examples of the anti-desmoglein 1 antibody, anti-desmoglein 2 antibody, anti-desmoglein 3 antibody, or anti-desmoglein 4 antibody are provided herein, but these are non-limiting examples and they can linked to other antibodies as well.

[0442] In some embodiments, as provided for herein, the anti-desmoglein 1 antibody, anti-desmoglein 2 antibody, anti-desmoglein 3 antibody, or anti-desmoglein 4 antibody, or binding fragment thereof, is linked directly or indirectly to a IL-2 mutein or binding fragment thereof. The IL-2 mutein can be any mutein as provided for herein or other IL-2 muteins known to one of skill in the art. In some embodiments, as provided herein, the anti-desmoglein 1 antibody, anti-desmoglein 2 antibody, anti-desmoglein 3 antibody, or anti-desmoglein 4 antibody, or binding fragment thereof, is linked directly or indirectly to a PD-1 antibody, such as those described herein.

[0443] In some embodiments, as provided herein, the PD-1 antibody, or binding fragment thereof, is linked directly or indirectly to an anti-desmoglein 1 antibody, an anti-desmoglein 2 antibody, an anti-desmoglein 3 antibody, or an anti-desmoglein 4 antibody, such as those described herein.

[0444] In some embodiments, the PD-1 antibody comprises a sequence as shown in PD-1 Antibody Table 1. In some embodiments, the antibody is in a scFV format. In some embodiments, the antibody comprises a VH sequence from any one of clones of PD-1 Antibody Table 1. In some embodiments, the antibody comprises a VK sequence from any one of clonse of the PD-1 Antibody Table 1. In some embodiments, the amino acid residues of the VH or VK shown above contain mutations. In some embodiments, the VH or VK contain 1, 2, 3, 4, 5, 6, 7, 8, 9, or 10 substitutions or mutations. In some embodiments, the substitution is a conservative substitution.

[0445] The molecules comprising an anti-desmoglein 1 antibody, an anti-desmoglein 2 antibody, an anti-desmoglein 3 antibody, or an anti-desmoglein 4 antibody (generically referred to as an “anti-desmoglein antibody”) and a PD-1 Ab can be various formats as described herein. For example, they can be in the following formats: PD-1 ML-N Format:

Heavy Chain: NT-[VH_PD-1]-[CH1-CH2-CH3]-[LinkerA]-[anti-desmoglein antibodyscFv]-CT

### Light Chain: NT-[VK_PD-1]-[CK]-CT

### PD-1 ML-C Format:

[0446] Heavy Chain: NT-[VH_anti-desmoglein antibody]-[CH1-CH2-CH3]-[LinkerA]-[PD-1scFv]-CT
Light Chain: NT-[VK_anti-desmoglein antibody]-[CK]-CT

### PD-1 IgG Format:

### Heavy Chain: NT-[VH_PD-1]-[CH1-CH2-CH3]

### Light Chain: NT-[VK_PD-1]-[CK]-CT

[0447] The abbreviations used above are as follows:

| Component | Description |
|---|---|
| NT | N-terminus |
| CT | C-terminus |
| VH_PD-1 | VH domain of PD-1 antibody |
| | as provided herein. |
| VK_PD-1 | VK domain of PD-1 antibody |
| | as provided herein. |
| PD-1scFv | PD-1 antibody in scFv |
| | comprising the VH and VK |
| | domain. |
| VH_ anti- desmoglein antibody | VH domain of- anti- |
| | desmoglein antibody Ab as |
| | provided herein. |
| VK_ anti- desmoglein antibody | VK domain of- anti- |
| | desmoglein antibody Ab as |
| | provided herein. This can |
| | also be substituted with a VL |
| | sequences as provided herein. |
| anti- desmoglein antibody scFv | anti- desmoglein antibody |
| | scFV Ab as provided herein. |
| VH_ anti- desmoglein antibody_BM1 | Rat anti-mouse anti- |
| | desmoglein antibody |
| | placeholder VH domain |
| VK_ anti- desmoglein antibody_BM1 | Rat anti-mouse anti- |
| | desmoglein antibody |
| | placeholder VK domain |
| anti- desmoglein antibody scFv_BM1 | Rat anti-mouse anti- |
| | desmoglein antibody |
| | placeholder scFv |
| VH_PD-1_BM1 | Anti-human PD-1 agonist |
| | placeholder VH domain |
| VK_PD-1_BM1 | Anti-human PD-1 agonist |
| | placeholder VK domain |
| CH1-CH2-CH3 | Human IgG1 Constant Heavy |
| | 1 (CH1), Constant Heavy 2 |
| | (CH2), and Constant Heavy 3 |
| | (CH3) domains |
| CK | Human constant kappa |
| | domain |
| IL-2_Mutein | IL-2 moiety such as those |
| | provided herein. |
| Linker_A | Gly/Ser linker (5 amino acid |
| | length) |
| Linker_B | Gly/Ser linker (15 amino acid |
| | length) |

[0448] The sequence of CH1-CH2-CH3 can be, for example,

(SEQ ID NO: 44)
ASTKGPSVFPLAPSSKSTSGGTAALGCLVKDYFPEPVTVSWNSGALTSG
VHTFPAVLQSSGLYSLSSVVTVPSSSLGTQTYICNVNHKPSNTKVDKKV
EPKSCDKTHTCPPCPAPEAAGAPSVFLFPPKPKDTLMISRTPEVTCVVV
DVSHEDPEVKFNWYVDGVEVHNAKTKPREEQYNSTYRVVSVLTVLHQDW
LNGKEYKCKVSNKALPAPIEKTISKAKGQPREPQVYTLPPSREEMTKNQ
VSLTCLVKGFYPSDIAVEWESNGQPENNYKTTPPVLDSDGSFFLYSKLT
VDKSRWQQGNVFSCSVMHEALHNHYTQKSLSLSPG

[0449] The sequence of CK can be, for example,

(SEQ ID NO: 45)
RTVAAPSVFIEFPPSDEQLKSGTASVVCLLNNEYPREAKVQWKVDNALQ
SGNSQESVTEQDSKDSTYSLSSTLTLSKADYEKHKVYACEVTHQGLSSP
VTKSFNRGEC

[0450] In some embodiments, if the therapeutic compound comprises a Fc portion, the Fc domain, (portion) bears mutations to render the Fc region “effectorless” that is unable to bind FcRs. The mutations that render Fc regions effectorless are known. In some embodiments, the mutations in the Fc region, which is according to the known numbering system, are selected from the group consisting of: K322A, L234A, L235A, G237A, L234F, L235E, N297, P331S, or any combination thereof. In some embodiments, the Fc mutations comprises a mutation at L234 and/or L235 and/or G237. In some embodiments, the Fc mutations comprise L234A and/or L235A mutations, which can be referred to as LALA mutations. In some embodiments, the Fc mutations comprise L234A, L235A, and G237A mutations.

[0451] Disclosed herein are Linker Region polypeptides, therapeutic peptides, and nucleic acids encoding the polypeptides (e.g., therapeutic compounds), vectors comprising the nucleic acid sequences, and cells comprising the nucleic acids or vectors.

[0452] Therapeutic compounds can comprise a plurality of specific targeting moieties. In some embodiments, the therapeutic compound comprises a plurality one specific targeting moiety, a plurality of copies of a donor specific targeting moiety or a plurality of tissue specific targeting moieties. In some embodiments, a therapeutic compound comprises a first and a second donor specific targeting moiety, e.g., a first donor specific targeting moiety specific for a first donor target and a second donor specific targeting moiety specific for a second donor target, e.g., wherein the first and second target are found on the same donor tissue. In some embodiments, the therapeutic compound comprises e.g., a first specific targeting moiety for a tissue specific target and a second specific targeting moiety for a second target, e.g., wherein the first and second target are found on the same or different target tissue.

[0453] In some embodiments, a therapeutic compound comprises a plurality of effector binding/modulating moieties each comprising an ICIM binding/modulating moiety, the number of ICIM binding/modulating moieties is sufficiently low that clustering of the ICIM binding/modulating moiety's ligand on immune cells (in the absence of target binding) is minimized, e.g., to avoid systemic agonizing of immune cells in the absence of binding of the therapeutic compound to target.

Polypeptides Derived from Reference, e.g., Human Polypeptides

[0454] In some embodiments, a component of a therapeutic molecule is derived from or based on a reference molecule, e.g., in the case of a therapeutic molecule for use in humans, from a naturally occurring human polypeptide. E.g., in some embodiments, all or a part of a CD39 molecule, a CD73 molecule, a cell surface molecule binder, a donor specific targeting moiety, an effector ligand binding molecule, an ICIM binding/modulating moiety, an IIC binding/modulating moiety, an inhibitory immune checkpoint molecule ligand molecule, an inhibitory molecule counter ligand molecule, a SM binding/modulating moiety, a specific targeting moiety, a target ligand binding molecule, or a tissue specific targeting moiety, can be based on or derived from a naturally occurring human polypeptide. E.g., a PD-L1 molecule can be based on or derived from a human PD-L1 sequence.

[0455] In some embodiments, a therapeutic compound component, e.g., a PD-L1 molecule:
[0456] a) comprises all or a portion of, e.g., an active portion of, a naturally occurring form of the human polypeptide;
[0457] b) comprises all or a portion of, e.g., an active portion of, a human polypeptide having a sequence appearing in a database, e.g., GenBank database, on Jan. 11, 2017, a naturally occurring form of the human polypeptide that is not associated with a disease state;
[0458] c) comprises a human polypeptide having a sequence that differs by no more than 1, 2, 3, 4, 5, 10, 20, or 30 amino acid residues from a sequence of a) orb);
[0459] d) comprises a human polypeptide having a sequence that differs by no more than 1, 2, 3, 4, 5 10, 20, or 30% its amino acids residues from a sequence of a) orb);
[0460] e) comprises a human polypeptide having a sequence that does not differ substantially from a sequence of a) or b); or
[0461] f) comprises a human polypeptide having a sequence of c), d), or e) that does not differ substantially in biological activity, e.g., ability to enhance or inhibit an immune response, from a human polypeptide having the sequence of a) or b).

[0462] In some embodiments, therapeutic compounds can comprise a plurality of effector binding/modulating moieties. For example, a therapeutic compound can comprise two or more of the following selected from:

[0463] (a) an ICIM binding/modulating moiety; (b) an IIC binding/modulating moiety; (c) an SM binding/modulating moiety, or (d) an ICSM binding/modulating moiety. In some embodiments, for example, a therapeutic compound can comprise a plurality, e.g., two, ICIM binding/modulating moieties (wherein they are the same or different); by way of example, two that activate or agonize PD-1; a plurality, e.g., two, IIC binding/modulating moieties; (wherein they are the same or different); a plurality, e.g., two, SM binding/modulating moieties (wherein they are the same or different), or a plurality, e.g., tow, ICSM binding/modulating moieties (wherein they are the same or different). In some embodiments, the therapeutic compound can comprise an ICIM binding/modulating moiety and an IIC binding/modulating moiety; an ICIM binding/modulating moiety and an SM binding/modulating moiety; an IIC binding/modulating moiety and an SM binding/modulating moiety, an ICIM binding/modulating moiety and an ICSM binding/modulating moiety; an IIC binding/modulating moiety and an ICSM binding/modulating moiety; or an ICSM binding/modulating moiety and an SM binding/modulating moiety. In some embodiments, the therapeutic compound comprises a plurality of targeting moieties. In some embodiments, the targeting moieties can be the same or different.

### Pharmaceutical Compositions and Kits

[0464] In another aspect, the present embodiments provide compositions, e.g., pharmaceutically acceptable compositions, which include a therapeutic compound described herein, formulated together with a pharmaceutically acceptable carrier. As used herein, “pharmaceutically acceptable carrier” includes any and all solvents, dispersion media, isotonic and absorption delaying agents, and the like that are physiologically compatible.

[0465] The carrier can be suitable for intravenous, intramuscular, subcutaneous, parenteral, rectal, local, ophthalmic, topical, spinal or epidermal administration (e.g., by injection or infusion). As used herein, the term “carrier” means a diluent, adjuvant, or excipient with which a compound is administered. In some embodiments, pharmaceutical carriers can also be liquids, such as water and oils, including those of petroleum, animal, vegetable or synthetic origin, such as peanut oil, soybean oil, mineral oil, sesame oil, and the like. The pharmaceutical carriers can also be saline, gum acacia, gelatin, starch paste, talc, keratin, colloidal silica, urea, and the like. In addition, auxiliary, stabilizing, thickening, lubricating, and coloring agents can be used. The carriers can be used in pharmaceutical compositions comprising the therapeutic compounds provided for herein.

[0466] The compositions and compounds of the embodiments provided herein may be in a variety of forms. These include, for example, liquid, semi-solid and solid dosage forms, such as liquid solutions (e.g., injectable and infusible solutions), dispersions or suspensions, liposomes and suppositories. The preferred form depends on the intended mode of administration and therapeutic application. Typical compositions are in the form of injectable or infusible solutions. In some embodiments, the mode of administration is parenteral (e.g., intravenous, subcutaneous, intraperitoneal, intramuscular). In some embodiments, the therapeutic molecule is administered by intravenous infusion or injection. In another embodiment, the therapeutic molecule is administered by intramuscular or subcutaneous injection. In another embodiment, the therapeutic molecule is administered locally, e.g., by injection, or topical application, to a target site. The phrases “parenteral administration” and “administered parenterally” as used herein means modes of administration other than enteral and topical administration, usually by injection, and includes, without limitation, intravenous, intramuscular, intraarterial, intrathecal, intracapsular, intraorbital, intracardiac, intradermal, intraperitoneal, transtracheal, subcutaneous, subcuticular, intraarticular, subcapsular, subarachnoid, intraspinal, epidural and intrasternal injection, and infusion.

[0467] Therapeutic compositions typically should be sterile and stable under the conditions of manufacture and storage. The composition can be formulated as a solution, microemulsion, dispersion, liposome, or other ordered structure suitable to high therapeutic molecule concentration. Sterile injectable solutions can be prepared by incorporating the active compound (i.e., therapeutic molecule) in the required amount in an appropriate solvent with one or a combination of ingredients enumerated above, as required, followed by filtered sterilization. Generally, dispersions are prepared by incorporating the active compound into a sterile vehicle that contains a basic dispersion medium and the required other ingredients from those enumerated above. In the case of sterile powders for the preparation of sterile injectable solutions, the preferred methods of preparation are vacuum drying and freeze-drying that yields a powder of the active ingredient plus any additional desired ingredient from a previously sterile-filtered solution thereof. The proper fluidity of a solution can be maintained, for example, by the use of a coating such as lecithin, by the maintenance of the required particle size in the case of dispersion and by the use of surfactants. Prolonged absorption of injectable compositions can be brought about by including in the composition an agent that delays absorption, for example, monostearate salts and gelatin.

[0468] As will be appreciated by the skilled artisan, the route and/or mode of administration will vary depending upon the desired results. In certain embodiments, the active compound may be prepared with a carrier that will protect the compound against rapid release, such as a controlled release formulation, including implants, transdermal patches, and microencapsulated delivery systems. Biodegradable, biocompatible polymers can be used, such as ethylene vinyl acetate, polyanhydrides, polyglycolic acid, collagen, polyorthoesters, and polylactic acid. Many methods for the preparation of such formulations are patented or generally known to those skilled in the art. See, e.g., Sustained and Controlled Release Drug Delivery Systems, J. R. Robinson, ed., Marcel Dekker, Inc., New York, 1978.

[0469] In certain embodiments, a therapeutic compound can be orally administered, for example, with an inert diluent or an assimilable edible carrier. The compound (and other ingredients, if desired) may also be enclosed in a hard or soft shell gelatin capsule, compressed into tablets, or incorporated directly into the subject's diet. For oral therapeutic administration, the compounds may be incorporated with excipients and used in the form of ingestible tablets, buccal tablets, troches, capsules, elixirs, suspensions, syrups, wafers, and the like. To administer a compound by other than parenteral administration, it may be necessary to coat the compound with, or co-administer the compound with, a material to prevent its inactivation. Therapeutic compositions can also be administered with medical devices known in the art.

[0470] Dosage regimens are adjusted to provide the optimum desired response (e.g., a therapeutic response). For example, a single bolus may be administered, several divided doses may be administered over time or the dose may be proportionally reduced or increased as indicated by the exigencies of the therapeutic situation. It is especially advantageous to formulate parenteral compositions in dosage unit form for ease of administration and uniformity of dosage. Dosage unit form as used herein refers to physically discrete units suited as unitary dosages for the subjects to be treated; each unit contains a predetermined quantity of active compound calculated to produce the desired therapeutic effect in association with the required pharmaceutical carrier. The specification for the dosage unit forms are dictated by and directly dependent on (a) the unique characteristics of the active compound and the particular therapeutic effect to be achieved, and (b) the limitations inherent in the art of compounding such an active compound for the treatment of sensitivity in individuals.

[0471] An exemplary, non-limiting range for a therapeutically or prophylactically effective amount of a therapeutic compound is 0.1-30 mg/kg, more preferably 1-25 mg/kg. Dosages and therapeutic regimens of the therapeutic compound can be determined by a skilled artisan. In certain embodiments, the therapeutic compound is administered by injection (e.g., subcutaneously or intravenously) at a dose of about 1 to 40 mg/kg, e.g., 1 to 30 mg/kg, e.g., about 5 to 25 mg/kg, about 10 to 20 mg/kg, about 1 to 5 mg/kg, 1 to 10 mg/kg, 5 to 15 mg/kg, 10 to 20 mg/kg, 15 to 25 mg/kg, or about 3 mg/kg. The dosing schedule can vary from e.g., once a week to once every 2, 3, or 4 weeks. In one embodiment, the therapeutic compound is administered at a dose from about 10 to 20 mg/kg every other week. The therapeutic compound can be administered by intravenous infusion at a rate of more than 20 mg/min, e.g., 20-40 mg/min, and typically greater than or equal to 40 mg/min to reach a dose of about 35 to 440 mg/m2, typically about 70 to 310 mg/m2, and more typically, about 110 to 130 mg/m2. In embodiments, the infusion rate of about 110 to 130 mg/m2 achieves a level of about 3 mg/kg. In other embodiments, the therapeutic compound can be administered by intravenous infusion at a rate of less than 10 mg/min, e.g., less than or equal to 5 mg/min to reach a dose of about 1 to 100 mg/m2, e.g., about 5 to 50 mg/m2, about 7 to 25 mg/m2, or, about 10 mg/m2. In some embodiments, the therapeutic compound is infused over a period of about 30 min. It is to be noted that dosage values may vary with the type and severity of the condition to be alleviated. It is to be further understood that for any particular subject, specific dosage regimens should be adjusted over time according to the individual need and the professional judgment of the person administering or supervising the administration of the compositions, and that dosage ranges set forth herein are exemplary only and are not intended to limit the scope or practice of the claimed composition.

[0472] The pharmaceutical compositions may include a “therapeutically effective amount” or a “prophylactically effective amount” of a therapeutic molecule. A “therapeutically effective amount” refers to an amount effective, at dosages and for periods of time necessary, to achieve the desired therapeutic result. A therapeutically effective amount of a therapeutic molecule may vary according to factors such as the disease state, age, sex, and weight of the individual, and the ability of the therapeutic compound to elicit a desired response in the individual. A therapeutically effective amount is also one in which any toxic or detrimental effects of a therapeutic molecule t is outweighed by the therapeutically beneficial effects. A “therapeutically effective dosage” preferably inhibits a measurable parameter, e.g., immune attack at least about 20%, more preferably by at least about 40%, even more preferably by at least about 60%, and still more preferably by at least about 80% relative to untreated subjects. The ability of a compound to inhibit a measurable parameter, e.g., immune attack, can be evaluated in an animal model system predictive of efficacy in transplant rejection or autoimmune disorders. Alternatively, this property of a composition can be evaluated by examining the ability of the compound to inhibit, such inhibition in vitro by assays known to the skilled practitioner.

[0473] A “prophylactically effective amount” refers to an amount effective, at dosages and for periods of time necessary, to achieve the desired prophylactic result. Typically, since a prophylactic dose is used in subjects prior to or at an earlier stage of disease, the prophylactically effective amount will be less than the therapeutically effective amount.

[0474] Also within the scope of the embodiments is a kit comprising a therapeutic compound described herein. The kit can include one or more other elements including: instructions for use; other reagents, e.g., a label, a therapeutic agent, or an agent useful for chelating, or otherwise coupling, a therapeutic molecule to a label or other therapeutic agent, or a radioprotective composition; devices or other materials for preparing the a therapeutic molecule for administration; pharmaceutically acceptable carriers; and devices or other materials for administration to a subject.

[0475] The following examples are illustrative, but not limiting, of the compounds, compositions and methods described herein. Other suitable modifications and adaptations known to those skilled in the art are within the scope of the following embodiments.

### EXAMPLES

### Example 1: HLA-Targeted PD-1 Agonizing Therapeutic Compounds

### Engineering of a HLA-Targeted PD-1-Agonizing Therapeutic Compounds.

[0476] Binding domains specific for HLA-A2 are obtained by cloning the variable regions of the Ig heavy and light chains from the BB7.2 hybridoma (ATCC) and converting into a single-chain Ab (scFv). Activity and specificity of the scFv can be confirmed by assessing binding of BB7.2 to HLA-A2 expressing cells in comparison to cells expressing other HLA-A alleles. The minimal PD-L1 residues required for PD-1 binding activity are identified by systematically evaluating the requirement of amino acids 3′ and 5′ of the PD-L1 IgV domain corresponding to amino acids 68-114. Expression constructs are designed and proteins synthesized and purified, with PD-1 binding activity tested by Biacore. The minimum essential amino acids required for PD-1 binding by the PD-L1 IgV domain are referred to as PD-L1-IgV. To generate a BB7.2 scFv and PD-L1-IgV bispecific molecule, a DNA fragment is synthesized encoding the bispecific single-chain antibody BB7.2×PD-L1-IgV with the domain arrangement VL_{BB7.2}-VH_{BB7.2}-PD-L1-IgV-IgG4 Fc and cloned into an expression vector containing a DHFR selection cassette.

[0477] Expression vector plasmid DNA is transiently transfected into 293T cells, and BB7.2×PD-L1-IgV bispecific antibodies are purified from supernatants using a protein A/G column. BB7.2×PD-L1-IgV bispecific antibody integrity is assessed by polyacrylamide gel. Binding of the BB7.2 scFv domain to HLA-A2 and PD-L1-IgV domain to PD-1 is assessed by ELISA and cell-based FACS assay.

[0478] The in vitro function of BB7.2×PD-L1-IgV bispecific antibodies is assessed using mixed lymphocyte reaction (MLR) assay. In a 96-well plate format, 100,000 irradiated human PBMCs from an HLA-A2⁺ donor are aliquoted per well and used as activators. HLA-A1⁻ responder T cells are then added together with increasing amounts of BB7.2×PD-L1-IgV bispecific antibody. The ability of responder T cells to proliferate over a period of 72 hours is assessed by BrdU incorporation, and with IFNg and IL2 cytokine production additionally evaluated in the co-culture supernatant as assessed by ELISA. BB7.2×PD-L1-IgV bispecific antibody is found to suppress MLR reaction as demonstrated by inhibiting HLA-A2⁻ responder T cell proliferation and cytokine production.

[0479] The in vivo function of BB7.2×PD-L1-IgV bispecific antibody is assessed using a murine mouse model of skin allograft tolerance. The C57BL/6-Tg(HLA-A2.1)1Enge/J (Jackson Laboratories, Bar Harbor Me.) strain of mouse is crossed with Balb/cJ, with F1 progeny expressing the HLA-A2.1 transgene and serving as allograft donors. C57BL/6J mice are shaved and surgically engrafted with skin removed from euthanized C57BL/6-Tg(HLA-A2.1)1Enge/J×Balb/cJF1 mice. At the same time, host mice start receiving intraperitoneal injections of the BB7.2×PD-L1-IgV bispecific antibody engineered to contain a murine IgG1 Fc or BB7.2 only or PD-L1-IgV only controls. Skin allograft rejection or acceptance is monitored over a period of 30 days, wherein hosts were euthanized and lymph node and allograft-resident lymphocyte populations quantified.

### Example 2: CD39 and/or CD73 as Effector Domains Creating a Purinergic Halo Surrounding a Cell Type or Tissue of Interest

[0480] A catalytically active fragment of CD39 and/or CD73 is fused to a targeting domain. Upon binding and accumulation at the target site, CD39 phosphohydrolyzes ATP to AMP. Upon binding and accumulation at the target site, CD73 dephosphorylates extracellular AMP to adenosine. A soluble catalytically active form of CD39 suitable for use herein has been found to circulate in human and murine blood, see, e.g., Yegutkin et al FASEB J. 2012 September; 26(9):3875-83. A soluble recombinant CD39 fragment is also described in Inhibition of platelet function by recombinant soluble ecto-ADPase/CD39, Gayle et al J Clin Invest. 1998 May 1; 101(9): 1851-1859. A suitable CD73 molecule comprises a soluble form of CD73 which can be shed from the membrane of endothelial cells by proteolytic cleavage or hydrolysis of the GPI anchor by shear stress see, e.g., reference: Yegutkin G, Bodin P, Burnstock G. Effect of shear stress on the release of soluble ecto-enzymes ATPase and 5′-nucleotidase along with endogenous ATP from vascular endothelial cells. Br J Pharmacol 2000; 129: 921-6.

[0481] The local catalysis of ATP to AMP or AMP to adenosine will deplete local energy stores required for fulminant T effector cell function. Treg function should not be impacted by ATP depletion due to their reliance on oxidative phosphorylation for energy needs (which requires less ATP), wherein T memory and other effector cells should be impacted due their reliance on glycolysis (requiring high ATP usage) for fulminant function.

### Example 3: Measuring Antibody-Induced PD-1 Signaling

[0482] Jurkat cells that stably express 2 constructs, 1) a human PD-1 polypeptide fused to a beta-galactosidase, which can be referred to as an “Enzyme donor” and 2) a SHP-2 polypeptide fused to a beta-galactosidase, which can be referred to as an “Enzyme acceptor.” A PD-1 antibody is contacted with the cell and when the PD-1 is engaged, SHP-2 is recruited to PD-1. The enzyme acceptor and enzyme donor form a fully active beta-galactosidase enzyme that can be assayed. This assay can be used to show activation of PD-1 signaling.

### Example 4: Measuring PD-1 Agonism

[0483] PD-1 agonists inhibit T cell activation. Without being bound to any particular theory, PD-1 agonism inhibits anti-CD3-induced T cell activation. Human or mouse cells are preactivated with PHA (for human T cells) or ConA (for mouse T cells) so that they express PD-1. The T cells are then “reactivated” with anti-CD3 in the presence of anti-PD-1 (or PD-L1) for the PD-1 agonism assay. T cells that receive a PD-1 agonist signal in the presence of anti-CD3 will show decreased activation, relative to anti-CD3 stimulation alone. Activation can be readout by proliferation or cytokine production (IL-2, IFNg, IL-17) and possibly by other markers, such as CD69 activation marker.

### Example 5. Expression and Function of Anti-MAdCAM/Mouse PD-L1 Fusion Protein is not Impacted by Molecular Configuration

[0484] A bispecific fusion molecule comprising an anti-mouse MAdCAM Ab/mouse PD-L1 molecule was expressed in two orientations. The first orientation consisted of an anti-mouse MAdCAM IgG with mouse PD-L1 fused at the C-terminus of it's heavy chain. The second orientation consisted of mouse PD-L1 fused at the N-terminus of an Ig Fc domain, with a C-terminally fused anti-mouse MAdCAM scFv. Both molecules were found to be well expressed in a mammalian expression system. It was also found that the molecules can bind to their respective binding partners, MAdCAM or PD-1 in both orientations, simultaneously. These results demonstrate that a molecule consisting of an anti-MAdCAM antibody fused to PD-L1, can be expressed in configurations whereby PD-L1 is N- or C-terminally fused to the Fc and retain proper functional binding activity.

[0485] Briefly, a pTT5 vector containing the single gene encoding a single polypeptide with mouse PD-L1 fused N-terminally of human IgG1 Fc domain and with C-terminal fused anti-MAdCAM scFv MECA89 was transfected into HEK293 Expi cells. Alternatively, two plasmids were co-transfected at equimolar ratios. The first plasmid encoded the light chain of MECA89 and the second encoded the full length IgG1 heavy chain of MECA89 with C-terminally fused mouse PD-L1. After 5-7 days, cell culture supernatants expressing the molecules were harvested, and clarified by centrifugation and filtration through a 0.22 μm filtration device. The bispecific molecules were captured on proA resin. The resin was washed with PBS pH 7.4 and the captured molecule was eluted using 100 mM glycine pH 2.5, with neutralization using a tenth volume of 1M Tris pH 8.5. The protein was buffer exchanged into PBS pH 7.4, and analyzed by size exclusion chromatography on a Superdex 200 3.2/300. Analysis of 1 μg of purified material by reducing and non-reducing SDS-PAGE on a Bis-Tris 4-12% gel was conducted.

[0486] Both proteins, regardless of orientation were expressed at over 10 mg/L, and were over 95% monodispersed after purification as shown by size exclusion chromatography and reducing/non-reducing SDS-PAGE. Accordingly, this demonstrates the production and activity of dual function bispecific molecules with different immunomodulators and tissue targeting moieties at the N- and C-terminus of an Fc domain. This also shows specifically that a PD-1 agonist and binding partner can be expressed at the N- or C-terminus of an Ig Fc domain.

### Example 6. A Bispecific Molecule Comprising a PD-1 Agonist Protoytpe Tethered to MAdCAM can Bind MAdCAM and PD-1 Simultaneously

[0487] Briefly, an immunosorbent plate was coated with mouse PD-1 at a concentration of 1 μg/mL in PBS pH 7.4, 75 μL/well, and incubated overnight at 4° C. Wells were washed with PBS pH 7.4 containing 0.05% Tween-20 (wash buffer) three times, and then blocked with 200 μl/well 1% BSA in PBS pH 7.4 (block buffer) for two hours at room temperature. After three washes with wash buffer, two bispecific molecules that comprises the PD-1 agonist prototype at either the N-terminus or C-terminus were diluted to 1 nM, 10 nM, and 100 nM in PBS containing 1% BSA and 0.05% Tween-20 (assay buffer). The diluted material was added to the mouse PD-1 coated plate at 75 μL/well for 1 hour at room temperature. After three washes with wash buffer, mouse MAdCAM was added to the plate at 75 μL/well, at a concentration of 10 nM in assay buffer for 1 hr at room temperature. After three washes with wash buffer, a goat biotinylated anti-mouse MAdCAM polyclonal antibody, diluted to 0.5 μg/mL in assay buffer, was added to the plate at 75 μL/well for 1 hour at room temperature. After three washes with wash buffer high sensitivity streptavidin HRP diluted in assay buffer at 1:5000 was added to the plate at 75 μl/well for 15 minutes at room temperature. After three washes with wash buffer and 1 wash with wash buffer (with no Tween-20), the assay was developed with TMB, and stopped with 1N HCL. OD 450 nm was measured. The experiment included appropriate controls for non-specific binding to the plate/block in the absence of mouse PD-1, as well as no MAdCAM controls, and mono-specific controls, that are unable to form a bridge between mouse PD-1 and mouse MAdCAM.

[0488] The results demonstrated that at concentrations of 1 nM, 10 nM, and 100 nM, both bispecific molecules, are able to simultaneously interact with mouse MAdCAM and mouse PD-L1, whilst the monospecific controls did not create a bridging signal. Additionally, there was no binding of any compound to MAdCAM at any concentration tested, when mouse PD-1 was not present on the plate surface, indicating none of the test compounds were interacting non-specifically with the plate surface. Thus, these results demonstrate that a bispecific molecule that is targeting binding to both MAdCAM and PD-1 can successfully bind to both molecules. Although the experiments were performed with PD-L1 as a substitute for a PD-1 antibody, it is expected that the PD-1 antibody will function in a similar manner.

### Example 7. A Bispecific PD-L1 Prototype Molecule Inhibits T Cells in a PD-1 Agonist Assay

[0489] A bispecific molecule that mimics a PD-1 agonist antibody was tested to demonstrate that PD-1 agonsim can inhibit T cells. Briefly, 7 week old female C57LB/6 mice were sacrificed and their splenocytes were isolated. The splenocytes were exposed to ConA for 3 days and then exposed to anti-CD3 in the presense or absence of the PD-1 type molecule, which in this example was a PD-L1 bispecific molecule that was tethered to a plate using anti-human IgG. T cells were then introduced to the PD-L1 bispecific molecule. The PD-L1, which mimics a PD-1 antibody were found to be a T cell agonist and inhibit T cell activation. The same experiments were repeated using a PD-L1 bispecific molecule that was fused with an anti-MAdCAM antibody, which were tethered to a plate by interacting with a MAdCAM coated plate. The PD-1 agonist mimic, the PD-L1/anti-MAdCAM antibody were found to be effective agonists of T cell activity. These results demonstrate that a bispecific molecule that mimics a PD-1 antibody/MAdCAM antibody fusion protein can exert functional inhibitory signaling into primary mouse T cell blasts when the molecule is captured via the MAdCAM antibody component at the end of the molecule.

### Example 8: A Bispecific PD-1 Prototype Molecule with a Different Tissue Tether can Inhibit T Cells in a PD-1 Agonist Assay

[0490] A fusion molecule of a PD-L1 was used as a substitute for a PD-1 antibody and linked to a Class I H-2Kk antibody. The MHC Class I H-2K^{k} tethered PD-L1 molecule had functional binding, similar to the data described in Examples 6 and 7. Briefly, splenocytes from C57Bl/6 mice were stimulated with Concanavalin A (ConA) and IL-2 for 3 days. Plates were coated with anti-CD3 (2C11) overnight at 4 C, washed. Plates were coated with anti-human IgG for 3 hrs at 37 C and washed. Mono-specific anti-H-2K^{k} (16-3-22) or bispecific anti-H-2K^{k}:mPD-L1 were added and incubated for 3 hr at 37 C and washed. All test articles contained a human IgG1-Fc portion. PBS (No Tx) was added to determine the assay background. ConA blasts were washed 2 times, added to the plate and incubated at 37 C. Supernatants were removed after 24 hrs. IFNg levels were determined by MSD. After 48 hrs, cell viability/metabolism was analyzed by Cell Titer-glo. When captured via the IgG Fc domain, an MHC Class I tethered PD-L1 bispecific can attenuate T cell activation in a mouse PD-1 agonism assay. Therefore, this example demonstrates that a different bispecific prototype molecule can exert functional inhibitory signaling into primary mouse T cell blasts—when the molecule is captured via a different tissue tether—in this case a mouse antibody to MHC Class I H-2K^{k}. Accordingly, this data demonstrates that the tethering is not specific to MAdCAM and is possible with other molecules that can act as targeting moieties as provided herein.

### Example 9. PD-1 Agonists can Induce Signaling in Jurkat Cells

[0491] Jurkat cells expressing both human PD-1 fused to a beta-galactosidase enzyme donor and SHP-2 fused to a beta-galactosidase enzyme acceptor are added to test conditions in a plate and incubated for 2 hrs. Agonist PD-1 antibodies induce signaling and SHP-2 recruitment, enzyme complementation and formation of an active beta-galactosidase enzyme. Beta-galactosidase substrate was added and chemiluminescence can be measured on a standard luminescence plate reader. Agonism is measured by chemiluminescence, where the more chemiluminescence that is measured indicates the greater agonism.

[0492] Agonism of a PD-1/MAdCAM bispecific molecule was measured in this assay. C110 (UCB) and CC-90006 (Celgene/Anaptys) were used as PD-1 agonist antibodies. Both are active and exhibit PD-1 agonism in functional assay in Ig-capture assay format. Briefly, plates were coated with anti-human IgG for overnight at 4 C and washed. Anti-tetanus toxin (TT) or benchmark agonist anti-PD-1 monoclonal antibodies, C110 or CC-90006 were added and incubated for 1 hr at 37 C and washed. All test articles contained a human IgG1-Fc. Media (No Tx) was added to determine the assay background. Plates were washed 3 times. Jurkat cells expressing both human PD-1 fused to a beta-galactosidase enzyme donor and SHP-2 fused to a beta-galactosidase enzyme acceptor were added and incubated for 2 hrs. Agonist PD-1 antibodies induce signaling and SHP-2 recruitment, enzyme complementation and formation of an active beta-galactosidase enzyme. Beta-galactosidase substrate was added and chemiluminescence was measured on a standard luminescence plate reader. The two human PD-1 agonist antibodies (C110 and CC-90006) bind and induce signaling (a surrogate for agonism) in the modified Jurkat reporter assay. Thus, this assay is a functional PD-1 agonism assay. C110:MECA89 (MECA89 is a known MAdCAM antibody) is a novel bispecific molecule created by fusing MAdCAM antibody, MECA89[scFv], to C-terminus of the heavy chain of C110. This fusion protein was found to be active and exhibit PD-1 agonism in functional assay when captured via IgG Fc domain, as was C110 only protein. However, only C110:MECA89 is active in functional assay format using MAdCAM protein as capture (the monospecific components do not signal).

[0493] Briefly, plates were coated with either anti-human IgG or recombinant mMAdCAM-1 overnight at 4 C and washed. Mono-specific Anti-tetanus toxin (TT), anti-MAdCAM-1 (MECA89) or agonist anti-PD-1 (C110) or bispecific C110:MECA89 were added and incubated for 1 hr at 37 C and washed. All test articles contained a human IgG1-Fc portion. PBS (No Tx) was added to determine the assay background. Plates were washed 2 times. Jurkat cells expressing both human PD-1 fused to a beta-galactosidase enzyme donor and SHP-2 fused to a beta-galactosidase enzyme acceptor were added and incubated for 2 hrs. Agonist PD-1 antibodies induce signaling and SHP-2 recruitment, enzyme complementation and formation of an active beta-galactosidase enzyme. Beta-galactosidase substrate was added and chemiluminescence was measured on a standard luminescence plate reader. Results: Both C110, and the MAdCAM-tethered C110 bispecific molecules can induce PD-1 signaling in the Jurkat reporter assay when the plate is coated with an anti-IgG Fc capture, but only the MAdCAM-tethered bispecific can induce PD-1 signaling in the reporter assay when the plate is coated with recombinant MAdCAM protein. These results demonstrate that the molecule tethered with MAdCAM and contains a PD-1 agonist antibody are functional, which is similar to the results shown with the PD-L1 as the PD-1 agonist surrogate.

### Example 10: Generation of PD-1 Agonist Antibodies

[0494] PD-1 deficient mice immunized with mouse PD-1 under conditions to generate an immune response against PD-1. 54 hybridomas were generated and identified that bind mouse PD-1. The antibodies produced by the different hybridomas were analyzed for T cell agonism according to the methods described in Examples 4 and 6. Out of the 54 hybridomas at least 6 were identified as PD-1 agonists. The antibodies were also tested for binding on PD-1 and were found to bind at the same site as the PD-L1 binding site.

[0495] Briefly, binding to the PD-L1 binding site was determined using the following assay. Immunosorbent plates were coated overnight with 75 μL of recombinant mouse PD-L1-Fc (2 μg/mL) in 1×PBS, pH 7.4. Plates were then washed 3× with 1×PBS and blocked for 2 hours at room temperature with 1×PBS supplemented with 1% BSA. Recombinant mouse PD-1-Fc (1 nM) was incubated with 100 nM of the indicated anti-mouse PD-1 antibody in 1×PBS supplemented with 1% BSA and 0.05% Tween-20 (Assay Buffer) for 1 hour at room temperature, shaking. After blocking, plates were washed 3× with 1×PBS supplemented with 0.05% Tween-20 PBST and the antibody-PD-1 conjugates were incubated with plate-bound mouse PD-L1. After washing away unbound PD-1 with PBST, plates were incubated with 75 μL of biotinylated, polyclonal anti-PD-1 antibody (0.5 μg/mL) in assay buffer, followed by amplification with 1:5000 streptavidin HRP also diluted in assay buffer. Plates were washed three times with PBST followed by three washes with 1×PBS before addition of 100 μL TMB followed by 100 μL 1M HCl to stop the developing. Absorbance read at 450 nm and normalized to binding of PD-1 to PD-L1 in the absence of antibody. The results showed that the active antibodies bind to the PD-L1 binding site. The inactive antibodies did not bind to the PD-L1 binding site. Therefore, this example demonstrates the ability to produce anti-PD-1 antibodies that are agonists, in addition to the previously identified PD-1 agonist antibodies described herein.

### Example 11: Tethered Anti-PD-1 Antibodies Acts as PD-1 Agonists

[0496] A human antibody scFv phage library was panned against recombinant human, mouse, and cyno PD-1 proteins across iterative selection rounds to enrich for antibody clones that recognize all three aforementioned species orthologues of PD-1. The scFv clones were configured in nt-VH-Linker-VL-ct format and fused to the M13 phage surface via the pIII coat protein. After selections, clonal scFvs were screened for binding to human, mouse, and cyno PD-1 expressed on the cell surface of CHO cells. Clones that were found to be cross reactive to all three cell surface expressed PD-1 species orthologues were converted using standard molecular biology techniques, into a human IgG1 format whereby each molecule was comprised of four polypeptide chains in total (2 heavy, and 2 light chains). The two light chains were identical to each other and the two heavy chains were identical to each other as provided.

[0497] The two identical heavy chains homodimerize and the two identical light chains pair with each heavy chain to form an intact human IgG1. The Fc domain contains the L234A, L235A, and G237A mutations to ablate FcγR interactions. The converted human IgG1 anti-PD-1 antibodies were transfected and expressed in HEK293 Expi cells, and purified by protein A chromatography. The protein concentration was determined using a nanodrop spectrophotometer in conjunction with antibody specific extinction coefficients. Antibodies were formulated in PBS pH 7.4.

[0498] The anti-PD-1 antibodies were next tested in the Jurkat assay described herein for agonist activity. Briefly, tissue culture plates were coated with anti-IgG or left uncoated. For captured format, test articles or controls were added to the anti-IgG coated wells at 100 nM, 25 nM or 12.5 nM and incubated for 3 hrs at 37 C. Plates were washed and Jurkat PD-1 cells were added. For the soluble format, soluble test articles or controls were added to wells at 100 nM, 25 nM or 12.5 nM already containing Jurkat PD1 cells. Luminescence was measured in a plate reader. The results demonstrated that nine of the twelve human/mouse cross-reactive PD-1 antibodies showed dose-dependent activity in the Jurkat assay when the anti-PD-1 antibodies were captured via anti-IgG, but not in the soluble format. This data demonstrates that the anti-PD-1 antibody can act as an agonist when tethered to its target by a targeting moiety.

[0499] In conclusion, without being bound to any particular theory, the data presented herein demonstrate that a PD-1 agonist/MAdCAM bispecific molecule can bind to both MAdCAM and PD-1 and inhibit effector T cell activity through PD-1 agonism. Thus, the molecules can be used to treat the various conditions provided herein and provide for localized and/or tissue specific immunomodulation and the down regulation of a T-Cell response.

### Example 12: Generation of IL-2 Muteins

[0500] A pTT5 vector containing the single gene encoding the human IL-2 mutein polypeptide fused N-terminally (SEQ ID NO: 57) or C-terminally (SEQ ID NO: 58) to human IgG1 Fc domain was transfected into HEK293 Expi cells. After 5-7 days, cell culture supernatants expressing IL-2 muteins were harvested, and clarified by centrifugation and filtration through a 0.22 μm filtration device. IL-2 muteins were captured on proA resin. The resin was washed with PBS pH 7.4 and the captured protein was eluted using 0.25% acetic acid pH 3.5, with neutralization using a tenth volume of 1M Tris pH 8.0. The protein was buffer exchanged into 30 mM HEPES 150 mM NaCl pH 7, and analyzed by size exclusion chromatography on a Superdex 200 3.2/300 column. Analysis of 5 ug of purified material by reducing and non-reducing SDS-PAGE on a Bis-Tris 4-12% gel was conducted. The IL-2 muteins were expressed at over 10 mg/L, and were over 95% monodispersed after purification as shown by size exclusion chromatography and reducing/non-reducing SDS-PAGE.

### Example 13: IL-2 Mutein Molecules Can Bind CD25

[0501] An immunosorbent plate was coated with CD25 at a concentration of 0.5 μg/mL in PBS pH 7.4, 75 μl/well, and incubated overnight at 4° C. Wells were washed with PBS pH 7.4 containing 0.05% Tween-20 (wash buffer) three times, and then blocked with 200 μl/well 1% BSA in PBS pH 7.4 (block buffer) for two hours at room temperature. After three washes with wash buffer IL-2 mutein molecules of Example 12 were diluted to eleven—two fold serial dilution in PBS containing 1% BSA and 0.05% Tween-20 (assay buffer) with 2 nM being the highest concentration. The diluted material was added to the CD25 coated plate at 75 μL/well for 1 hour at room temperature. After three washes with wash buffer, a goat biotinylated anti-IL-2 polyclonal antibody, diluted to 0.05 μg/mL in assay buffer, was added to the plate at 75 μL/well for 1 hour at room temperature. After three washes with wash buffer high sensitivity streptavidin HRP diluted in assay buffer at 1:5000 was added to the plate at 75 μL/well for 15 minutes at room temperature. After three washes with wash buffer and 1 wash with wash buffer (with no Tween-20), the assay was developed with TMB, and stopped with 1N HCL. OD 450 nm was measured. The experiment included appropriate controls for non-specific binding of IL-2. mutein molecules to the plate/block in the absence of CD25 and a negative control molecule that is unable to bind CD25.

[0502] The results indicate that at concentrations of 2 nM-1.9 pM, IL-2 mutein molecules are able to bind CD25 with sub nanomolar EC50s. Additionally, there was no detection of any compound at any concentration tested, when CD25 was not present on the plate surface, indicating none of the test compounds were interacting non-specifically with the plate surface (data not shown).

### Example 14: In Vitro p-STAT5 Assay to Determine Potency and Selectivity of IL-2 Mutein Molecules

[0503] Peripheral blood mononuclear cells (PBMCs) were prepared using FICOLL-PAQUE Premium and Sepmate tubes from freshly isolated heparinized human whole blood. PBMCs were cultured in 10% fetal bovine serum RPMI medium in the presence of wild-type IL-2 or IL-2 mutein of Example 12 for 20 minutes and then fixed for 10 minutes with BD Cytofix. Fixed cells were sequentially permeabilized with BD Perm III and then BioLegend FOXP3 permeabilization buffer. After blocking with human serum for 10 minutes, cells were stained for 30 minutes with antibodies for phospho-STAT5 FITC, CD25 PE, FOXP3 AF647 and CD4 PerCP Cy5.5 and then acquired on an Attune NXT with plate reader. The IL-2 mutein of Example 12 potently and selectively induces STAT5 phosphorylation in Tregs but not Teffs.

### Example 15: Methods for Generation of Bispecific MAdCAM-Tethered IL-2 Mutein Molecules

[0504] A pTT5 vector containing the single gene encoding the single B0001 polypeptide comprising an IL-2 mutein with a N88D, V69A, and Q74P mutations fused to a Fc protein with the LALA mutations as provided for herein with a GGGGS(×3) (SEQ ID NO: 30) linker and scFV antibody that binds to MAdCAM or a similar molecule but with a GGGGS(×4) (SEQ ID NO: 22) linker B0002 with human IL-2 mutein fused N-terminally of human IgG1 Fc domain and with c-terminal fused anti-mMAdCAM scFv MECA89 was transfected into HEK293 Expi cells. For B0003, two plasmids were co-transfected at equimolar ratios. The first plasmid encoded the light chain of MECA89 and the second encoded the full length IgG1 heavy chain of MECA89 with C-terminally fused human IL-2 mutein. After 5-7 days, cell culture supernatants expressing B0001, B0002, and B0003 were harvested, and clarified by centrifugation and filtration through a 0.22 μm filtration device. B0001, B0002, and B0003 were captured on proA resin. The resin was washed with PBS pH 7.4 and the captured protein was eluted using 0.25% acetic acid pH 3.5, with neutralization using a tenth volume of 1M Tris pH 8.0. The protein was buffer exchanged into 30 mM HEPES 150 mM NaCl pH 7, and analyzed by size exclusion chromatography on a Superdex 200 3.2/300. Analysis of lug of purified material by reducing and non-reducing SDS-PAGE on a Bis-Tris 4-12% gel was conducted.

[0505] B0001, B0002, and B0003 were expressed at over 8 mg/L, and were over 95% monodispersed after purification as shown by size exclusion chromatography and reducing/non-reducing SDS-PAGE. This experiment shows that dual function bispecific molecules with immunomodulators at either the N- or C-terminus can be produced and the position of the IL-2. mutein protein (either at the N- or C-terminus) did not significantly alter expression and therefore, either format can be used.

### Example 16: Bispecific MAdCAM-Tethered IL-2 Mutein Molecules Can Bind MAdCAM and CD25 Simultaneously

[0506] An immunosorbent plate was coated with recombinant mouse MAdCAM-1 at a concentration of 1 μg/mL in PBS pH 7.4, 75 μL/well, and incubated overnight at 4° C. Wells were washed with PBS pH 7.4 containing 0.05% Tween-20 (wash buffer) three times, and then blocked with 200 μL/well 1% BSA in PBS pH 7.4 (block buffer) for two hours at room temperature. After three washes with wash buffer, B0001, B0002, B0003 were diluted to 1 nM, 10 nM, and 100 nM in PBS containing 1% BSA and 0.05% Tween-20 (assay buffer). The diluted material was added to the mouse MAdCAM-1 coated plate at 75 μL/well for 1 hour at room temperature. After three washes with wash buffer, human CD25 was added to the plate at 75 μL/well, at a concentration of 10 nM in assay buffer for 1 hour at room temperature. After three washes with wash buffer, a goat biotinylated anti-human CD25 polyclonal antibody, diluted to 0.4 μg/mL in assay buffer, was added to the plate at 75 μL/well for 1 hour at room temperature. After three washes with wash buffer high sensitivity streptavidin HRP diluted in assay buffer at 1:5000 was added to the plate at 75 μL/well for 15 minutes at room temperature. After three washes with wash buffer and 1 wash with wash buffer (with no Tween-20), the assay was developed with TMB, and stopped with 1N HCL. OD 450 nm was measured. The experiment included appropriate controls for non-specific binding of the proteins of Example 15 to the plate/block in the absence of mouse MAdCAM-1, as well as no CD25 controls, and mono-specific controls, that are unable to form a bridge between human CD25 and mouse MAdCAM.

[0507] It was found that that at concentrations of 1 nM, 10 nM, and 100 nM, the bispecific molecules of Example 15 were able to simultaneously interact with mouse MAdCAM and human CD25, whilst the monospecific controls, did not create a bridging signal. Additionally, there was no binding of any compound to CD25 at any concentration tested, when mouse MAdCAM-1 was not present on the plate surface, indicating none of the test compounds were interacting non-specifically with the plate surface. These results demonstrate that the bispecific molecules can bind both MAdCAM and CD25 simultaneously in a functional binding assay, such as an ELISA.

### Example 17: In Vitro p-STAT5 Assay Demonstrating Activity and Selectivity of Bispecific MAdCAM-Tethered IL-2 Mutein when in Solution or when Tethered

[0508] Recombinant mouse MAdCAM was coated onto wells of a 96 well high binding plate (Corning) overnight. After washing 2 times with PBS, the plate was blocked for 1 hour with 10% FBS RPMI media. A MAdCAM-tethered IL-2 mutein bispecific of Example 15 or untethered IL-2 mutein control (such as those prepared in Example 12) were captured for 1 hour. After washing 2 times with PBS, freshly-isolated human PBMCs were stimulated for 60 minutes with captured IL-2 mutein or for comparison IL-2 mutein in solution. Cells were then fixed for 10 minutes with BD Cytofix, permeabilized sequentially with BD Perm III and BioLegend FOXP3 permeabilization buffer, blocked with human serum and stained for 30 minutes with antibodies against phospho-STAT5 FITC (CST), CD25 PE, FOXP3 AF647 and CD4 PerCP Cy5.5 (BD) and acquired on an Attune NXT with plate loader. In solution, both molecules have comparable activity and selectivity on T_{reg} versus T_{eff}. Plates coated with mouse MAdCAM were able to capture the bispecific molecule of Example 15 and the captured/immobilized bispecific molecule was still able to selectively activate T_{reg}s over T_{effs}. This example demonstrates that MAdCAM-tethered IL-2 mutein molecules can retain biological activity and selectivity when in solution or when captured/immobilized.

### Example 18: Immunogenicity of IL-2 Muteins

[0509] IL-2 mutein sequences were analyzed using the NetMHCIIPan 3.2 software, which can be found at www “dot” cbs “dot” dtu “dot” dk/services/NetMHCIIpan/. Artificial neural networks were used to determine peptide affinity to MHC class II alleles. In that analysis, 9-residue peptides with potentially direct interaction with the MHC class II molecules were recognized as binding cores. Residues adjacent to binding cores, with potential to influence the binding indirectly, were also examined as masking residues. Peptides comprising both the binding cores and masking residues were marked as strong binders when their predicted K_{D} to the MHC class II molecule was lower than 50 nM. Strong binders have a greater chance of introducing T cell immunogenicity.

[0510] A total of 9 MHCII alleles that are highly represented in North America and Europe were included in the in silico analysis. The panel of IL-2 mutein molecules tested included the IL-2 muteins with L53I, L56I, L80I, or L118I mutations. Only MHCII alleles DRB1_1101, DRB1_1501, DRB1_0701, and DRB1_0101 yielded hits with any of the molecules assessed. The peptide hits for DRB_1501 were identical between all constructs tested including wild-type IL-2 with the C125S mutation. The addition of L80I removes 1 T cell epitope for DRB1-0101 [ALNLAPSKNFHLRPR (SEQ ID NO: 68)] and modestly reduces the affinity of two other T cell epitopes [EEALNLAPSKNFHLR (SEQ ID NO: 69) and EALNLAPSKNFHLRP (SEQ ID NO: 70)]. For MHCII allele DRB1-0701, L80I removes 1 T cell epitope [EEALNLAPSKNFHLR (SEQ ID NO: 71)]. Therefore, the data demonstrates that a IL-2 mutein comprising the L80I mutation should be less immunogenic, which is a surprising and unexpected result from the in silico analysis.

### Example 19: Generation of Additional IL-2 Muteins

[0511] A pTT5 vector containing the single gene encoding the single IL-2 mutein of SEQ ID NO: 53, SEQ ID NO: 54, SEQ ID NO: 55, SEQ ID NO: 56 (and IL-2 mutein control; SEQ ID NO: 50) polypeptide with human IL-2 mutein fused N-terminally of human IgG1 Fc domain was transfected into HEK293 Expi cells. After 5-7 days, cell culture supernatants expressing SEQ ID NO: 53, SEQ ID NO: 54, SEQ ID NO: 55, SEQ ID NO: 56 (and IL-2 mutein control; SEQ ID NO: 50) were harvested, and clarified by centrifugation and filtration through a 0.22 μm filtration device. SEQ ID NO: 53, SEQ ID NO: 54, SEQ ID NO: 55, SEQ ID NO: 56 (and IL-2 mutein control; SEQ ID NO: 50) were captured on proA resin. The resin was washed with PBS pH 7.4 and the captured protein was eluted using 0.25% acetic acid pH 3.5, with neutralization using a tenth volume of 1M Tris pH 8.0. The protein was buffer exchanged into 30 mM HEPES 150 mM NaCl pH 7, and analyzed by size exclusion chromatography on a Superdex 200 3.2/300 column. Analysis of 5 μg of purified material by reducing and non-reducing SDS-PAGE on a Bis-Tris 4-12% gel was conducted.

[0512] IL-2 muteins SEQ ID NO: 53, SEQ ID NO: 54, SEQ ID NO: 55, SEQ ID NO: 56 (and IL-2 mutein control; SEQ ID NO: 50) expressed at over 45 mg/L, and were over 95% monodispersed after purification as shown by size exclusion chromatography and reducing/non-reducing SDS-PAGE.

### Example 20: IL-2 Muteins of Example 19 can Bind CD25

[0513] An immunosorbent plate was coated with CD25 at a concentration of 0.5 μg/mL in PBS pH 7.4, 75 μL/well, and incubated overnight at 4° C. Wells were washed with PBS pH 7.4 containing 0.05% Tween-20 (wash buffer) three times, and then blocked with 200 μL/well 1% BSA in PBS pH 7.4 (block buffer) for two hours at room temperature. After three washes with wash buffer IL-2 muteins SEQ ID NO: 53, SEQ ID NO: 54, SEQ ID NO: 55, SEQ ID NO: 56 were diluted to eleven—two fold serial dilution in PBS containing 1% BSA and 0.05% Tween-20 (assay buffer) with 2 nM being the highest concentration. The diluted material was added to the CD25 coated plate at 75 μL/well for 1 hour at room temperature. After three washes with wash buffer, a goat biotinylated anti-IL-2 polyclonal antibody, diluted to 0.05 μg/mL in assay buffer, was added to the plate at 75 μL/well for 1 hour at room temperature. After three washes with wash buffer high sensitivity streptavidin HRP diluted in assay buffer at 1:5000 was added to the plate at 75 μL/well for 15 minutes at room temperature. After three washes with wash buffer and 1 wash with wash buffer (with no Tween-20), the assay was developed with TMB, and stopped with 1N HCL. OD 450 nm was measured. The experiment included appropriate controls for non-specific binding of the molecules to the plate/block in the absence of CD25. The results indicate that at concentrations of 2 nM-1.9 pM, the muteins of Example 19 were able to bind CD25 with sub nanomolar EC50s. Additionally, there was no detection of any compound at any concentration tested, when CD25 was not present on the plate surface, indicating none of the test compounds were interacting non-specifically with the plate surface. Thus, the muteins of Example 19 can bind to CD25.

### Example 21: IL-2 Muteins of Example 19 are Potent and Selective

[0514] Peripheral blood mononuclear cells (PBMCs) were prepared using FICOLL-PAQUE Premium and Sepmate tubes from freshly isolated heparinized human whole blood. PBMCs were cultured in 10% fetal bovine serum RPMI medium in the presence of wild-type IL-2 or the muteins of Example 19 for 20 minutes and then fixed for 10 minutes with BD Cytofix. Fixed cells were sequentially permeabilized with BD Perm III and then BioLegend FOXP3 permeabilization buffer. After blocking with human serum for 10 minutes, cells were stained for 30 minutes with antibodies for phospho-STAT5 FITC (CST), CD25 PE, FOXP3 AF647 and CD4 PerCP Cy5.5 (all BD) and then acquired on an Attune NXT with plate reader. The IL-2 muteins of Example 19 were found to be potent and have selectivity against Treg versus Teff. The mutein comprising the L118I mutation was found to have increased activity and selectivity as compared to the other muteins.

### Example 22: IL-2 Muteins Expand Tregs in Humanized Mice

[0515] NSG mice humanized with human CD34+ hematopoietic stem cells were purchased from Jackson Labs. On days 0 and 7, the mice were dosed subcutaneously with 1 μg IL-2 mutein (SEQ ID NO: 50) or other IL-2 muteins SEQ ID NO: 53, SEQ ID NO: 54, SEQ ID NO: 55, or SEQ ID NO: 56. On Day 7, mice were euthanized and whole blood and spleens were collected. Whole blood was aliquoted into a 96 well deep well plate and fixed for 10 minutes using BD Fix Lyse. Splenocytes were isolated using 70 μm filters (BD) and red blood cells were lysed using RBC lysis buffer from BioLegend. After washing with 2% fetal bovine serum PBS, splenocytes were labeled with near infrared live dead stain (Invitrogen) for 20 minutes and then fixed for 20 minutes using BioLegend fixation buffer. Both whole blood cells and splenocytes were then permeabilized using BioLegend FOXP3 permeabilization buffer, blocked with human serum and stained for 30 minutes with antibodies against human CD8a FITC (BL), human CD25 PE (BD), human FOXP3 AF647 (BD) CD4 PerCP Cy5.5 (BD), human Siglec-8 PE Cy7 (BL), human CD3 BV421 (BL), human CD45 BV605 (BL), human CD56 BV785 (BL) and mouse CD45 (BV711) and acquired on an Attune NXT with plate loader.

[0516] Compared to vehicle control, IL-2 muteins SEQ ID NO: 54 and SEQ ID NO: 56 selectively induced Tregs in mouse spleens and whole blood (p<0.0005 by ANOVA with Dunn's Multiple Comparison Test). The other IL-2 muteins also increased the frequency of Tregs, though these changes compared to the vehicle group were not statistically significant. There were no significant changes in the frequencies of CD56+ NK cells, CD3+ T cells, CD8+ cytotoxic T lymphocytes, CD4+ helper T cells or CD25lo/FOXP3− T effectors in mice dosed with SEQ ID NO: 54 and SEQ ID NO: 56. These results demonstrate that the IL-2 muteins increase the frequency of regulatory T cells.

### Example 23: Generation of Bispecific mMAdCAM-Tethered IL-2 Mutein Molecule

[0517] A bispecific MAdCAM-IL-2 mutein was produced, with the antibody being the heavy and light chains of MECA89. This was produced using two plasmids encoding both heavy and light chains were co-transfected at equimolar ratios. The first plasmid encoded the light chain of MECA89 and the second encoded the full length IgG1 heavy chain of MECA89 with C-terminally fused to a human IL-2. mutein comprising the L118I mutation. After 3-5 days, cell culture supernatants expressing the bispecific were harvested, and clarified by centrifugation and filtration through a 0.22 μm filtration device. The bispecific was captured on proA resin. The resin was washed with PBS pH 7.4 and the captured protein was eluted using 0.25% acetic acid pH 3.5, with neutralization using a tenth volume of 1M Tris pH 8.0. The protein was buffer exchanged into 30 mM HEPES 150 mM NaCl pH 7, and analyzed by size exclusion chromatography on an AdvanceBio SEC column. Analysis of 1 μg of purified material by reducing and non-reducing SDS-PAGE on a Bis-Tris 4-12% gel was conducted.

[0518] The bispecific molecule expressed at 17 mg/L, and was over 95% monodispersed after purification as shown by size exclusion chromatography and reducing/non-reducing SDS-PAGE. These results demonstrate that it was able to produce dual function bispecific molecules with immunomodulators at the C-terminus.

### Example 24: Generation of MAdCAM Antibodies

[0519] A human antibody scFv phage library was panned against recombinant human, mouse, and cyno MAdCAM proteins across iterative selection rounds to enrich for antibody clones that recognize all three aforementioned species orthologues of MAdCAM. The scFv clones were configured in nt-VH-Linker-VL-ct format and fused to the M13 phage surface via the pIII coat protein. After selections, clonal scFvs were screened by ELISA for binding to human, mouse, and cyno MAdCAM expressed on the cell surface of CHO cells. Clones that were found to be cross reactive to all three cell surface expressed MAdCAM species orthologues were converted using standard molecular biology techniques or gene synthesis, into a human IgG1 format whereby each molecule was comprised of four polypeptide chains in total (2 heavy, and 2 light chains). The two light chains were identical to each other and the two heavy chains were identical to each other. The two identical heavy chains (1 and 2) homodimerize and the two identical light chains (3 and 4) pair with each heavy chain to form an intact human IgG1. The Fc domain contains the L234A, L235A, and G237A mutations to ablate FcγR interactions. The format can be illustrated as follows:
[0520] Chain 1: nt-VH1-CH1-CH2-CH3-ct
[0521] Chain 2: nt-VH1-CH1-CH2-CH3-ct
[0522] Chain 3: nt-VK1-CK-ct
[0523] Chain 4: nt-VK1-CK-ct

[0524] In addition, MAdCAM scFvs were also converted using standard molecular biology techniques (such as Gibson Cloning procedure) or gene synthesis into a bispecific format whereby an IL-2 mutein was situated at the c-terminus of the IgG heavy chain of the MAdCAM antibody, as outlined below:
[0525] Chain 1: nt-VH1-CH1-CH2-CH3-ct-Linker-IL-2 mutein
[0526] Chain 2: nt-VH1-CH1-CH2-CH3-ct-Linker-IL-2 mutein
[0527] Chain 3: nt-VK1-CK-ct
[0528] Chain 4: nt-VK1-CK-ct

[0529] An ELISA was used to analyze binding of anti-MAdCAM scFvs to captured or plate bound human, cyno, and mouse MAdCAM. Biotinylated human and cyno MAdCAM were captured on a streptavidin coated plate, and mouse MAdCAM-Fc coated directly onto an immunosorbent plate. After a blocking step, the plates were washed and scFv in crude periplasmic lysate was applied to the plate surface. scFv binding was detected using an anti-V5 HRP conjugate. The assay was developed with TMB substrate and stopped with acid. The absorbance at 450 nm was measured. Appropriate wash steps were applied between each step of the ELISA. Human versus cyno and human versus mouse were evaluated. The scFv's were also analyzed using surface plasmon resonance technology. After being captured on a biosensor surface via the V5 tag, soluble monomeric human MAdCAM was titrated and both binding and dissociation measured and fit to a 1:1 binding model allowing the derivation of on and off-rates.

[0530] The results measured indicate that the majority of clones tested have human and cyno MAdCAM binding cross reactivity and a small panel have additional cross reactivity to mouse MAdCAM. Biosensor experiments demonstrated that the clones exhibited a range of binding on and off-rates against human MAdCAM with kₐ values ranging from 10³ l/Ms through 10⁷ l/Ms and k_{d} values ranging 10⁻¹ through 10⁻⁴ l/s. Certain clones have an off-rate slower than 2×10e2 l/s. Thus, MadCAM antibodies were generated and can be used in a bispecific format.

### Example 25: Generation of Bispecific Human MAdCAM-Tethered IL-2 Muteins of Example 19

[0531] Two plasmids each were co-transfected at equimolar ratios. The first plasmid in each case encoded the light chain of Hu.MAdCAM and the second encoded the full length IgG1 heavy chain of Hu.MAdCAM with a C-terminally fused human IL-2 mutein comprising the L118I mutation as illustrated in the Table of MAdCAM-IL-2 Mutein Bispecific Compounds provided herein. After 3-5 days, cell culture supernatants expressing the Hu.MAdCAM-IL-2 mutein bispecifics was harvested, and clarified by centrifugation and filtration through a 0.22 μm filtration device. The Hu.MAdCAM-IL-2 mutein bispecifics were captured on proA resin. The resin was washed with PBS pH 7.4 and the captured proteins were eluted using 0.25% acetic acid pH 3.5, with neutralization using a tenth volume of 1M Tris pH 8.0. The proteins were buffer exchanged into 30 mM HEPES 150 mM NaCl pH 7, and analyzed by size exclusion chromatography on an AdvanceBio SEC column. Analysis of lug of purified material by reducing and non-reducing SDS-PAGE on a Bis-Tris 4-12% gel was conducted. The Hu.MAdCAM-IL-2 mutein bispecifics expressed at over 10 mg/L, and was over 95% monodispersed after purification as shown by size exclusion chromatography and reducing/non-reducing SDS-PAGE. Thus, these results demonstrate that fully human dual function bispecific molecules with immunomodulators at the C-terminus can be produced.

### Example 26: Durability of Signaling Induced by IL-2 Muteins

[0532] Peripheral blood mononuclear cells (PBMCs) were prepared using FICOLL-PAQUE Premium and Sepmate tubes from freshly isolated heparinized human whole blood. PBMCs were cultured in 10% fetal bovine serum RPMI medium in the presence of IL-2 muteins for 60 minutes. Cells were then wash 3 times and incubated for an additional 3 hours. Cells were then fixed for 10 minutes with BD Cytofix. Fixed cells were sequentially permeabilized with BD Perm III and then BioLegend FOXP3 permeabilization buffer. After blocking with human serum for 10 minutes, cells were stained for 30 minutes with antibodies for phospho-STAT5 FITC, CD25 PE, FOXP3 AF647 and CD4 PerCP Cy5.5 and then acquired on an Attune NXT with plate reader. All four IL-2 muteins of Example 19 induced durable signaling in Treg but not in Teff as compared to the control. An IL-2 mutein of SEQ ID NO: 56 is superior to an IL-2 mutein of SEQ ID NO: 55, SEQ ID NO: 54 or SEQ ID NO: 53. These results demonstrate that the IL-2 can induce durable and selective signaling in Treg which should lead to greater Treg expansion in vivo and permit less frequent dosing to achieve Treg expansion.

### Example 27: In Vitro p-STAT5 Assay Demonstrates Activity and Selectivity of Bispecific Hu.MAdCAM-Tethered IL-2 Muteins when in Solution or when Tethered

[0533] Recombinant human MAdCAM was coated onto wells of a 96 well high binding plate (Corning) overnight. After washing 2 times with PBS, the plate was blocked for 1 hour with 10% FBS RPMI media. MAdCAM-tethered IL-2 mutein bispecifics or untethered IL-2 mutein control were captured for 1 hour. After washing 2 times with PBS, freshly isolated human PBMCs were stimulated for 60 minutes with captured IL-2 mutein or for comparison IL-2 mutein in solution. Cells were then fixed for 10 minutes with BD Cytofix, permeabilized sequentially with BD Perm III and BioLegend FOXP3 permeabilization buffer, blocked with human serum and stained for 30 minutes with antibodies against phospho-STAT5 FITC (CST), CD25 PE, FOXP3 AF647 and CD4 PerCP Cy5.5 (BD) and acquired on an Attune NXT with plate loader.

[0534] In solution, IL-2 mutein bispecifics tethered to human MAdCAM and the control have comparable activity and selectivity on Treg versus Teff. Plates coated with MAdCAM were able to capture bispecifics, and the captured/immobilized bispecifics were still able to selectively activate Tregs over Teffs. This example demonstrates that IL-2 mutein bispecifics targeting human MAdCAM can retain biological activity and selectivity when in solution or when captured/immobilized.

### Example 28. IL-2 Muteins Induce pSTAT5 in Human Tregs

[0535] Purified PBMC from heparinized whole blood from six healthy donors were treated with serial dilutions of a IL-2 mutein proteins comprising a sequence of SEQ ID NO: 59, wherein X₃ is I and X₁, X₂, and X₄ are L or a sequence of SEQ ID NO: 59, wherein X₄ is I and X₁, X₂, and X₃ are L at 37 C for 30 minutes. Cells were fixed, washed, permeabilized and washed. Cells were stained with antibodies that detect both surface markers and intracellular/nuclear markers (pSTAT5 and FOXP3). Data was collected on Attune N×T cytometer. Tregs were gated as mononuclear, singlet, CD3pos, CD4pos, CD25hi, FoxP3pos. The % of gated Tregs that express phosphorylated STAT5 was measured. Best-fit curves were fit to the dose-response of pSTAT5 and EC50 values were determined. Average EC50 values of all 6 donors were determined for IL-2 of SEQ ID NO: 59, wherein X₃ is I and X₁, X₂, and X₄ are L (37.26±7.30; n=16) and for IL-2 of SEQ ID NO: 59, wherein X₄ is I and X₁, X₂, and X₃ are L (23.11±5.35; n=15). The data demonstrate that the IL-2 muteins can induce pSTAT5 in human Tregs. The IL-2 comprising a sequence of SEQ ID NO: 59, wherein X₄ is I and X₁, X₂, and X₃ are L is more potent than the IL-2 sequence comprising SEQ ID NO: 39, but both are active across multiple populations of cells.

### Example 29: IL-2 Muteins Induce pSTAT5 in Monkey PBMCs In Vitro

[0536] Purified PBMC from heparinized whole blood from three healthy monkeys were treated with serial dilutions a IL-2 mutein protein comprising a sequence of SEQ ID NO: 59, wherein X₃ is I and X₁, X₂, and X₄ are L or a sequence of SEQ ID NO: 59, wherein X₄ is I and X₁, X₂, and X₃ are L at 37 C for 60 minutes. Fluorochrome conjugated Anti-CD25 and anti-CD4 were added for the final 30 min of the IL-2 mutein treatment. Cells were fixed, washed, permeabilized and washed. Cells were stained with remaining antibodies that detect both surface markers and intracellular/nuclear markers (pSTAT5 and FOXP3). Data was collected on Attune N×T cytometer. Tregs were gated as mononuclear, singlet, CD4pos, CD25hi, FoxP3pos. The % of gated Tregs that express phosphorylated STAT5 was measured. The IL-2 muteins were found to induce pSTAT5 in monkeys.

### Example 30: IL-2 Muteins Induce Expansion of Treg Cells and Induce Treg Proliferation In Vivo

[0537] Venous whole blood was collected in K2EDTA tubes from monkeys (cynomolgus) before dosing with IL-2 muteins of SEQ ID NO: 59, wherein X₃ is I and X₁, X₂, and X₄ are L or a sequence of SEQ ID NO: 59, wherein X₄ is I and X₁, X₂, and X₃ are L (2 timepoints/cyno, 5 cynos) and after dosing with either SEQ ID NO: 59, wherein X₃ is I and X₁, X₂, and X₄ are L (5 timepoints/cyno, 2 cynos) or SEQ ID NO: 59, wherein X₄ is I and X₁, X₂, and X₃ are L (5 timepoints/cyno, 3 cynos). Samples were divided in two and stained for two FACS panels separately. One was a “Treg panel” and one was a general immunophenotyping panel. RBCs were lysed and cells were stained for surface and intracellular markers after fixation and permeabilization. For the FACS analysis the number of total cells/μl was determined by ADVIA. The number of cells of a given subpopulation/μl was then calculated with the total number/ul and the % of total. For each monkey, the average number of a given cell type/μl of the two pre-dose bleeds was averaged and used to normalize the post-dose bleeds, such that “fold-change from pre-dose” was determined. To analyze serum cytokined and chemokines, plasma from K2EDTA whole blood was frozen until the end of the study. Chemokine and cytokine amounts were quantified by a multiplex MSD assay using serial dilutions of a standard control. The average and range of MCP-1 and IP-10 were determined in pre-dose bleeds. Both muteins were found to expand Treg and induce Treg proliferation in the monkeys. These results demonstrate that the IL-2 muteins function in an in vivo animal model that is similar to humans. It was also found that neither molecule significantly expanded Tconv cells, CD4 cells (naive T) or CD8 cells (Cytotoxic T), NK cells in the monkeys (non-human primate). It was also found that neither molecule significantly induced serum chemokines. This data demonstrates that the IL-2 muteins can expand Treg cells and induce Treg cell proliferation without unwanted expansion or activation of other pathways. Thus, the IL-2 muteins are surprisingly potent, effective, and selective for Treg expansion and proliferation.

[0538] In summary, the embodiments and examples provided herein demonstrate that the IL-2 muteins that can be targeted to certain tissues can function as intended and be used to treat the diseases and conditions described herein. Furthermore, the examples provided for herein demonstrate the surprising and unexpected result that a bispecific molecule comprising a MAdCAM antibody and a IL-2 mutein can function to selectively and potently activate Tregs over Teffs, which demonstrates that the molecules can be used to treat or ameliorate the conditions described herein. The examples also demonstrate that the IL-2 mutein can function to selectively and potently activate Tregs over Teffs when used alone (or linked to a Fc protein) as provided for herein.

### Example 31: Antibodies Bind to MAdCAM

[0539] Certain antibodies provided for herein were tested for their ability to bind to MAdCAM. The following table provides the binding information against the various targets and other activities. The antibodies, in either scFv or IgG format, which were tested for their ability to bind to human or mouse cells expressing MadCAM as well as binding to cyno MadCAM protein. The results are presented either as “−” for no significant binding or as binding at different levels (e.g., “+”, “++”, and “+++”).

Activities of MADCAM Antibodies from Table 1

| Clone ID | | | | | | | | | | |
|---|---|---|---|---|---|---|---|---|---|---|
| as in | | | MAdCAM | | | | Cell-Based | | ELISA | |
| MAdCAM | MAdCAM | | Binding | | | | Integrin | | Integrin | |
| Ab | Cell Binding | | ELISA | MAdCAM Octet Binding | | | Blockade | | Blockade | |
| Table 1 | Human | Mouse | Cyno | Human | Cyno | Mouse | Human | Mouse | Human | Mouse |
| 1. | +++ | ++ | NT | +++ | +++ | 0.16 | − | NT | − | + |
| 2. | ++ | +++ | NT | + | +++ | +++ | + | − | NT | − |
| 3. | ++ | +++ | ++ | NT | NT | NT | + | NT | NT | NT |
| 4. | +++ | +++ | NT | + | +++ | +++ | + | − | + | + |
| 5. | +++ | +++ | NT | ++ | +++ | +++ | − | NT | − | + |
| 6. | +++ | − | NT | +++ | +++ | NB | + | NT | + | NT |
| 7. | ++ | +++ | NT | + | +++ | +++ | + | NT | NT | + |
| 8. | +++ | − | +++ | NT | NT | NT | + | NT | NT | NT |
| 9. | +++ | +++ | NT | +++ | +++ | +++ | − | NT | − | + |
| 10. | +++ | − | +++ | NT | NT | NT | + | NT | NT | NT |
| 11. | +++ | − | +++ | NT | NT | NT | + | NT | NT | NT |
| 12. | +++ | − | +++ | NT | NT | NT | + | NT | NT | NT |
| 13. | +++ | − | +++ | NT | NT | NT | + | NT | NT | NT |
| 14. | +++ | − | +++ | NT | NT | NT | + | NT | NT | NT |
| 15. | +++ | − | +++ | NT | NT | NT | − | NT | NT | NT |
| 16. | +++ | − | +++ | NT | NT | NT | + | NT | NT | NT |
| 17. | +++ | − | +++ | NT | NT | NT | + | NT | NT | NT |
| 18. | +++ | − | +++ | NT | NT | NT | + | NT | NT | NT |
| 19. | +++ | − | NT | +++ | +++ | − | − | NT | + | NT |
| 20. | +++ | − | NT | +++ | +++ | − | + | NT | − | NT |
| 21. | +++ | − | +++ | NT | NT | NT | + | NT | NT | NT |
| 22. | ++ | − | +++ | NT | NT | NT | + | NT | NT | NT |
| 23. | +++ | − | NT | +++ | +++ | − | − | NT | − | NT |
| 24. | +++ | − | +++ | NT | NT | NT | + | NT | NT | NT |
| 25. | + | − | +++ | NT | NT | NT | NT | NT | NT | NT |
| 26. | ++ | − | +++ | NT | NT | NT | + | NT | NT | NT |
| 27. | +++ | − | +++ | NT | NT | NT | + | NT | NT | NT |
| 28. | ++ | − | +++ | NT | NT | NT | + | NT | NT | NT |
| 29. | +++ | − | +++ | NT | NT | NT | + | NT | NT | NT |
| 30. | ++ | − | +++ | NT | NT | NT | + | NT | NT | NT |
| 31. | +++ | − | +++ | NT | NT | NT | + | NT | NT | NT |
| 32. | +++ | − | +++ | NT | NT | NT | + | NT | NT | NT |
| 33. | ++ | − | +++ | NT | NT | NT | + | NT | NT | NT |
| 34. | +++ | − | +++ | NT | NT | NT | + | NT | NT | NT |
| 35. | +++ | − | +++ | NT | NT | NT | − | NT | NT | NT |
| 36. | +++ | − | +++ | NT | NT | NT | + | NT | NT | NT |
| 37. | +++ | − | NT | NT | NT | NT | + | NT | NT | NT |
| 38. | ++ | − | +++ | NT | NT | NT | + | NT | NT | NT |
| 39. | +++ | − | +++ | NT | NT | NT | + | NT | NT | NT |
| 40. | +++ | − | +++ | NT | NT | NT | + | NT | NT | NT |
| 41. | +++ | − | +++ | NT | NT | NT | + | NT | NT | NT |
| 42. | +++ | − | ++ | NT | NT | NT | + | NT | NT | NT |
| 43. | +++ | − | +++ | NT | NT | NT | + | NT | NT | NT |
| 44. | +++ | − | +++ | NT | NT | NT | + | NT | NT | NT |
| 45. | +++ | − | +++ | NT | NT | NT | + | NT | NT | NT |
| 46. | +++ | − | +++ | NT | NT | NT | + | NT | NT | NT |
| 47. | +++ | − | +++ | NT | NT | NT | + | NT | NT | NT |
| 48. | +++ | − | +++ | NT | NT | NT | + | NT | NT | NT |
| 49. | +++ | − | +++ | NT | NT | NT | + | NT | NT | NT |
| 50. | +++ | − | +++ | NT | NT | NT | − | NT | NT | NT |
| 51. | +++ | − | +++ | NT | NT | NT | − | NT | NT | NT |
| 52. | +++ | − | +++ | NT | NT | NT | + | NT | NT | NT |
| 53. | +++ | − | +++ | NT | NT | NT | − | NT | NT | NT |
| 54. | +++ | − | +++ | NT | NT | NT | + | NT | NT | NT |
| 55. | +++ | − | +++ | NT | NT | NT | + | NT | NT | NT |
| 56. | +++ | − | +++ | NT | NT | NT | + | NT | NT | NT |
| 57. | +++ | − | +++ | NT | NT | NT | − | NT | NT | NT |
| 58. | +++ | − | +++ | NT | NT | NT | − | NT | NT | NT |
| 59. | +++ | +++ | NT | +++ | +++ | +++ | + | + | + | − |
| 60. | +++ | ++ | NT | +++ | +++ | NT | − | NT | − | + |
| 61. | ++ | +++ | NT | +++ | +++ | NT | + | − | − | + |
| 62. | +++ | +++ | NT | ++ | +++ | NT | − | NT | − | + |
| 63. | ++ | +++ | NT | + | + | +++ | + | + | + | + |
| 64. | + | +++ | NT | ++ | + | NT | + | − | + | + |
| 65. | ++ | +++ | NT | + | +++ | NT | + | − | + | + |
| 66. | +++ | +++ | NT | ++ | + | NT | − | − | + | + |

Activities of MADCAM Antibodies from Table 2

| Clone ID | | | | | | | | | | |
|---|---|---|---|---|---|---|---|---|---|---|
| as in | | | MAdCAM | | | | | | | |
| MAdCAM | MAdCAM | | Binding | | | | Cell-Based | | ELISA | |
| Ab | Cell Binding | | ELISA | MAdCAM Octet Binding | | | Integrin Blockade | | Integrin Blockade | |
| Table 2 | Human | Mouse | Cyno | Human | Cyno | Mouse | Human | Mouse | Human | Mouse |
| 1. | +++ | +++ | NT | NT | NT | NT | − | NT | NT | NT |
| 2. | ++ | +++ | ++ | NT | NT | NT | + | NT | NT | NT |
| 3. | ++ | +++ | ++ | NT | NT | NT | + | NT | NT | NT |
| 4. | +++ | +++ | NT | ++ | ++ | +++ | − | − | − | NT |
| 5. | +++ | +++ | NT | ++ | ++ | +++ | − | NT | − | NT |
| 6. | +++ | − | +++ | +++ | +++ | − | + | + | + | + |
| 7. | ++ | +++ | NT | − | − | +++ | NT | NT | − | NT |
| 8. | ++ | +++ | NT | − | +++ | +++ | NT | NT | − | NT |
| 9. | +++ | − | NT | NT | NT | NT | − | NT | − | − |
| 10. | +++ | ++ | NT | NT | NT | NT | − | NT | NT | NT |
| 11. | +++ | +++ | NT | +++ | +++ | +++ | − | NT | + | |
| 12. | +++ | − | +++ | NT | NT | NT | + | NT | + | + |
| 13. | +++ | − | NT | NT | NT | NT | NT | NT | NT | NT |
| 14. | + | − | NT | − | − | − | + | NT | − | + |
| 15. | +++ | − | NT | NT | NT | NT | − | NT | NT | NT |
| 16. | +++ | − | NT | NT | NT | NT | NT | NT | − | + |
| 17. | +++ | − | NT | +++ | +++ | − | − | NT | + | |
| 18. | +++ | − | NT | NT | NT | NT | − | NT | + | + |
| 19. | +++ | − | NT | NT | NT | NT | NT | NT | NT | NT |
| 20. | +++ | − | NT | +++ | +++ | − | − | NT | NT | NT |
| 21. | +++ | − | NT | NT | NT | NT | NT | NT | NT | NT |
| 22. | +++ | − | NT | +++ | ++ | − | − | NT | + | + |
| 23. | +++ | − | NT | +++ | +++ | − | − | NT | + | + |
| 24. | ++ | − | NT | − | − | − | + | NT | + | + |
| 25. | +++ | − | NT | NT | NT | NT | NT | NT | NT | NT |
| 26. | ++ | − | NT | − | NT | NT | + | NT | + | + |
| 27. | ++ | − | NT | − | NT | NT | − | NT | | |
| 28. | + | − | NT | − | − | − | + | NT | + | + |
| 29. | + | − | NT | − | − | − | + | NT | + | + |
| 30. | +++ | + | NT | +++ | +++ | − | − | NT | NT | NT |
| 31. | +++ | − | NT | NT | NT | NT | NT | NT | NT | NT |
| 32. | +++ | − | NT | NT | NT | NT | NT | NT | − | + |
| 33. | + | − | NT | NT | NT | NT | NT | NT | NT | NT |
| 34. | +++ | − | +++ | NT | NT | NT | + | NT | − | + |
| 35. | + | − | NT | − | NT | NT | − | NT | − | + |
| 36. | +++ | + | NT | +++ | ++ | NT | − | NT | NT | NT |
| 37. | ++ | − | NT | NT | NT | NT | NT | NT | − | + |
| 38. | +++ | − | NT | NT | NT | NT | NT | NT | − | + |
| 39. | +++ | − | +++ | NT | NT | NT | + | NT | NT | NT |
| 40. | ++ | − | NT | NT | NT | NT | NT | NT | + | − |
| 41. | ++ | − | NT | NT | NT | NT | NT | NT | − | − |
| 42. | +++ | − | +++ | NT | NT | NT | + | NT | + | − |
| 43. | +++ | − | +++ | NT | NT | NT | + | NT | − | − |
| 44. | ++ | − | NT | NT | NT | NT | NT | NT | + | − |
| 45. | +++ | − | NT | ++ | +++ | NT | − | NT | + | + |
| 46. | +++ | − | +++ | +++ | inconclusive | − | − | NT | + | − |
| 47. | +++ | − | +++ | NT | NT | NT | + | NT | − | − |
| 48. | +++ | − | ++ | NT | NT | NT | + | NT | NT | NT |
| 49. | +++ | − | +++ | NT | NT | NT | + | NT | NT | NT |
| 50. | +++ | − | NT | NT | NT | NT | NT | NT | NT | NT |
| 51. | ++ | − | +++ | NT | NT | NT | + | NT | NT | NT |
| 52. | +++ | − | NT | NT | NT | NT | NT | NT | NT | NT |
| 53. | + | − | + | NT | NT | NT | + | NT | NT | NT |
| 54. | +++ | − | +++ | NT | NT | NT | + | NT | NT | NT |
| 55. | +++ | − | NT | ++ | +++ | NT | − | NT | NT | NT |
| 56. | +++ | − | ++ | NT | NT | NT | + | NT | NT | NT |
| 57. | +++ | − | NT | NT | NT | NT | − | NT | NT | NT |
| 58. | +++ | − | NT | +++ | +++ | NT | − | NT | NT | NT |
| 59. | +++ | − | +++ | NT | NT | NT | + | NT | NT | NT |
| 60. | +++ | ++ | NT | +++ | +++ | − | − | NT | NT | NT |
| 61. | +++ | − | NT | NT | NT | NT | NT | NT | NT | NT |
| 62. | +++ | − | NT | NT | NT | NT | − | NT | NT | NT |
| 63. | +++ | − | NT | +++ | +++ | NT | − | NT | NT | NT |
| 64. | +++ | − | +++ | NT | NT | NT | + | NT | NT | NT |
| 65. | +++ | − | NT | +++ | +++ | − | − | NT | NT | NT |
| 66. | +++ | − | + | NT | NT | NT | + | NT | NT | NT |
| 67. | +++ | − | NT | NT | NT | NT | NT | NT | NT | NT |
| 68. | +++ | − | NT | NT | NT | NT | NT | NT | NT | NT |
| 69. | +++ | − | +++ | NT | NT | NT | + | NT | NT | NT |
| 70. | +++ | − | NT | NT | NT | NT | NT | NT | NT | NT |
| 71. | +++ | − | NT | NT | NT | NT | NT | NT | NT | NT |
| 72. | +++ | − | + | NT | NT | NT | + | NT | NT | NT |
| 73. | +++ | − | NT | NT | NT | NT | NT | NT | NT | NT |
| 74. | +++ | − | NT | +++ | +++ | − | − | NT | NT | NT |
| 75. | +++ | +++ | +++ | +++ | +++ | +++ | + | + | NT | NT |
| 76. | +++ | +++ | NT | +++ | +++ | NT | − | | NT | NT |
| 77. | +++ | ++ | NT | − | NT | NT | − | − | NT | NT |
| 78. | +++ | +++ | NT | +++ | +++ | NT | − | | NT | NT |
| 79. | +++ | +++ | NT | + | + | +++ | + | − | NT | NT |
| 80. | ++ | − | NT | − | NT | NT | + | + | NT | NT |
| 81. | ++ | +++ | NT | − | NT | NT | − | − | NT | NT |
| 82. | +++ | +++ | NT | ++ | +++ | NT | − | − | NT | NT |
| 83. | +++ | ++ | NT | ++ | +++ | NT | − | NT | NT | NT |
| 84. | +++ | ++ | NT | +++ | +++ | NT | − | NT | NT | NT |

### Example 32: A Bispecific Molecule Comprising a MAdCAM Antibody and an IL-2 Mutein Specifically Localize to High Endothelial Venules (HEV) in Gut after s.c. Dosing in Mice

[0540] Mice were dosed s.c. with untethered IL-2 mutein or MAdCAM-tethered IL-2 mutein. Intestinal tissues were harvested 4 days later, and stained for human IgG1 (to detect the test article Ig backbone of both the untethered and tethered molecules, or MECA367 (to detect MAdCAM-expressing HEV). It was found that only the MAdCAM-tethered IL-2 mutein molecule specifically localized to the HEV whereas the unethether IL-2 mutein did not show detectable or significant localization at the same tissues.

### Example 33: Bispecific MadCAM-IL2M do not Block MADCAM:α4/β7 Interactions and Therefore do not Affect Cell Trafficking

[0541] A MAdCAM-tethered IL-2 mutein molecule was tested to determine whether it blocks α4/β7 integrin binding to MAdCAM. The assay demonstrated that it did not. It was also found that the bispecific did not, therefore, have an impact on cell trafficking. The binding activity was performed by ELISA or a cell interaction assay.

### Example 34: IL-2 Mutein Tethered to MAdCAM Antibody is Functional

[0542] CHO cells were transfected with human or mouse MAdCAM to generate MAdCAM-expressing CHO cells that were then grown on a plate. The test article was added, allowed to bind, then unattached test article was washed out. Human PBMC were added and 30 minutes later evaluated by FACS for phosphorylation of STAT5 Tregs were pSTAT5+ revealing activation by IL-2 mutein, Tconv cells remained unactivated, despite presumed high local concentration of the bispecific on cell surface.

### Example 35: MAdCAM-Tethered-IL2 Mutein Ameliorates Weight Loss in TNBS-Induced Colitis in Humanized Mice, Similar to Low-Dose IL-2

[0543] Mice were sensitized with TNBS D-7, primed with TNBS DO. Mice were dosed daily with low doses of IL-2 (positive control) or vehicle (negative control) from D-7 to D3. Mice dosed with the MAdCAM-tethered-IL2 mutein D-7 and DO. It was found that the attenuation of weight loss by the MAdCAM-tethered-IL2 mutein was similar to attenuation of weight loss by LD IL-2. Therefore, these results demonstrate that the tethered approach is functional even though it is specifically localizes to HEV as shown in the previous examples.

[0544] The format of the MAdCAM-tethered-IL2 mutein as described in Examples 22-24 was where the MAdCAM component was an IgG with IL-2 mutein moiety fused at the C-terminus of the heavy chain. The IL-2 mutein, however, had a Fc portion at its N-terminus as described herein, such as SEQ ID NO: 56 The format of the bispecific is a multiple chain polypeptides, which can be represented in the following format: Heavy Chain: NT-[VH_MAdCAM]-[CH1-CH2-CH3]-[Linker_B]-[IL-2 Mutein]-CT, wherein NT=N-terminus

[VH_MAdCAM]=Any VH domain provided for herein or a VH domain comprising the CDR1, CDR2, or CDR3 as described in MadCAM Antibody Table 1 or 2;
[CH1-CH2-CH3]=the Human IgG1 Constant Heavy 1 (CH1), Constant Heavy 2 (CH2), and Constant Heavy 3 (CH3) domains, which can have a sequence of:

(SEQ ID NO: 44)
ASTKGPSVFPLAPSSKSTSGGTAALGCLVKDYFPEPVTVSWNSGALTSG
VHTFPAVLQSSGLYSLSSVVTVPSSSLGTQTYICNVNHKPSNTKVDKKV
EPKSCDKTHTCPPCPAPEAAGAPSVFLFPPKPKDTLMISRTPEVTCVVV
DVSHEDPEVKFNWYVDGVEVHNAKTKPREEQYNSTYRVVSVLTVLHQDW
LNGKEYKCKVSNKALPAPIEKTISKAKGQPREPQVYTLPPSREEMTKNQ
VSLTCLVKGFYPSDIAVEWESNGQPENNYKTTPPVLDSDGSFFLYSKLT
VDKSRWQQGNVFSCSVMHEALHNHYTOKSLSLSPG;

[Linker_B]=GGGGS (SEQ ID NO: 23), which could also be GGGGSGGGGSGGGGS (SEQ ID NO: 30);
[IL-2_Mutein]=Any IL2 mutein provided for herein, including but not limited to SEQ ID NO: 56; and

### CT=C-terminus.

[0545] The molecule can also have a light chain format of:
Light Chain: NT-[VK_MAdCAM]-[CK]-CT, wherein

### NT=N-terminus;

[0546] [VK_MAdCAM]=as illustrated in MAdCAM Antibody Table 1 or 2;
[CK]=Human constant kappa domain, which can have a sequence of: RTVAAPSVFIFPPSDEQLKSGTASVVCLLNNEYPREAKVQWKVDNALQSGNSQESVTEQDSKDSTYSLSSTLTLSKA DYEKHKVYACEVTHQGLSSPVTKSFNRGEC (SEQ ID NO: 45); and

### CT=C-terminus.

### Example 36: Identification of Abs that can Function as PD-1 Agonists

[0547] PD-1 component antibodies were screened in 3 formats. The primary format is PD-1 ML-N whereby the PD-1 agonist component is a PD-1 IgG with an anti-MAdCAM moiety placeholder fused at the C-terminus of the heavy chain. The MAdCAM scFv was a “placeholder” scFv called MECA89 which is a rat anti-mouse MAdCAM antibody. However, the placeholder Ab could be replaced with another MAdCAM antibody described herein. The following table provides the data for the different antibody clones described herein:

| | | | | | | | | Mouse | | | |
|---|---|---|---|---|---|---|---|---|---|---|---|
| | | | | | | | | agonist-CTG: | | | |
| | | | | | | | | IC50 (avg. PD- | | | |
| | | | | | | | Mouse | L1 = 2.4 nM) | | | |
| | | | | Captured Agonist | | | agonist-CTG | ++; +; − | | | |
| | Antagonist bin | | | +++; ++; +; − | | | ++; +; − | (<10 nM; | Soluble Agonist | | |
| | Strong; Moderate; | | | (>0.75; >0.5; | | | (Yes; | <100 nM; | ++; +; − (Yes; | | |
| Clone | Weak; None | | | >0.25; >0) | | | Weak; No) | >100 nM) | Weak/Maybe; No) | | |
| (scFv) | IgG1 | MLC | MLN | IgG1 | MLC | MLN | IgG1 | IgG1 | IgG1 | MLC | MLN |
| PD1AB1 | — | — | − | + | − | − | | | ++ | | |
| PD1AB2 | − | — | + | + | − | + | | | ++ | | |
| PD1AB3 | — | | | + | | − | | | | | |
| PD1AB4 | − | | | + | | | ++ | ++ | ++ | | |
| PD1AB5 | + | — | + | + | − | + | | | ++ | | |
| PD1AB6 | + | — | — | ++ | + | − | ++ | ++ | ++ | | |
| PD1AB7 | − | — | | + | − | | ++ | ++ | ++ | | |
| PD1AB8 | − | | + | + | | + | | | ++ | | |
| PD1AB9 | — | | − | + | | | | | ++ | | |
| PD1AB10 | + | — | + | + | − | | | | ++ | | |
| PD1AB11 | — | | − | + | | | | | ++ | | |
| PD1AB12 | — | — | — | + | − | − | | | | | |
| PD1AB13 | — | — | − | + | − | | | | ++ | | |
| PD1AB14 | — | — | — | + | − | | | | ++ | | |
| PD1AB15 | — | | − | + | | + | | | | | − |
| PD1AB16 | — | — | — | − | − | + | | | ++ | | − |
| PD1AB17 | − | | N/T | +++ | | +++ | | | | | − |
| PD1AB18 | — | N/T | − | ++ | | − | ++ | ++ | ++ | | |
| PD1AB19 | − | — | + | − | − | + | | | ++ | | |
| PD1AB20 | — | — | − | ++ | − | − | ++ | ++ | ++ | | |
| PD1AB21 | — | — | — | ++ | − | − | | | ++ | | |
| PD1AB22 | + | | − | + | | | ++ | ++ | ++ | | |
| PD1AB23 | — | — | — | + | − | − | + | ++ | ++ | | |
| PD1AB24 | − | | — | + | | | | | ++ | | |
| PD1AB25 | − | — | + | +++ | + | +++ | | | ++ | | |
| PD1AB26 | — | — | N/T | + | − | | | | ++ | | |
| PD1AB27 | — | — | — | + | − | | | | | | |
| PD1AB28 | − | | + | + | | − | | | ++ | | |
| PD1AB29 | − | — | − | +++ | − | + | | | | | |
| PD1AB30 | − | − | + | +++ | + | ++ | | | ++ | | |
| PD1AB31 | + | | − | + | | − | | | | | |
| PD1AB32 | − | — | − | − | − | + | | | | | |

[0548] These data demonstrate that the Ab can act as an agonist when bound to targeting moiety such as a MAdCAM Ab. The antibodies can also be linked to IL-2 muteins or other moieties as provided herein.

### Example 37: Intestinal and Skin Tethered Targeting Moieties can be Used to Target a PD-1 Agonist and Treat GVHD or Immune Disorders

[0549] A bi-specific molecule comprising an anti-MAdCAM antibody and a PD-1 agonist as provided herein were tested in a GVHD intestinal model. These molecules PD-1 bispecifics demonstrated target-specific localization in vivo and were also able to reduce morbidity and specifically reduce pathology in a mouse GvHD model. These results demonstrate that the targeted method of conferring immunotolerance was efficacious. The results are illustrated in FIG. 20.

[0550] To confirm in vivo localization wild type mice were injected with gut-targeted PD1 agonist bispecifics. Small intestine was collected, snap frozen in OCT, and 5 uM sections were stained with anti-huIgG to detect test article and a reference marker to ensure appropriate binding. The bispecific molecule was found to localize properly and specifically. The survival data is illustrated in FIG. 21.

[0551] Tethered PD-1 agonist improves survival in a mouse Graft versus Host Disease model NSG mice were engrafted with huPBMCs to induce GvHD and dosed with the bi-specific, a gut-specific PD-1 agonist, beginning 10 days post-engraftment; mice were sacrificed based on pre-determined weight loss and body condition parameters. The bi-specific treated mice showed improved survival compared to vehicle-treated controls, demonstrating efficacy of the tethered agonist.

[0552] The bi-specific tether, which is referred to as PND00164 as illustrated below, reduces CD8⁺ and CD4⁺ T cell infiltration specifically in the small intestine. In a separate study, PBMC-engrafted NSG were similarly dosed with PD-1 bispecific antibodies following engraftment and sacrificed after 33 days to determine local PD. Histological analysis of gut and immune tissues showed a reduction in CD8⁺ and CD4⁺ T cell infiltration specifically in the small intestine and not in non-targeted tissues including the spleen. The data is illustrated in FIG. 22

[0553] Another bi-specific molecule utilizing a skin specific tether was used to localize PD-1 agonist. The targeting moiety was an anti-desmoglein 1 antibody, such as the ones provided herein. FIG. 23 illustrates the specificity of the tether. The reference targeting is shown on the left and the skin-specific tether utilizing the anti-desmoglein 1 antibody is shown on the right. This data illustrates the specificity of the molecule. Next, the molecule was tested in BALBc mices. BALBc mice were randomized by weight into test groups. On Day 0 and 1 mice were treated epicutaneously with 20 uL of 0.5% DNFB (4:1 Acetone:Olive Oil) on a shaved area of the abdomen. On day 4 mice were administered test articles (either vehicle, the tethered effector (anti-PD-1 antibody tethered to an anti-desmoglein 1 antibody), an untethered PD-1 agonist, or the control dexamethasone) via IV tail vein injection. From day 4-7 mice were treated with Dexamethasone PO at 0.3 mg/kg. On day 5 mice were challenged with 0.2% DNFB on the right ear (10 ul front and back), the left ear was treated with vehicle without DNFB. Caliper measurements of ear thickness were taken using a spring-loaded micrometer caliper (Mitutuyo) on days 5, 6, and 7. On day 7 mice were sacrificed and ears were removed. An 8 mm punch biopsy was taken from each ear and the difference between the weight of the left and right ear biopsies was determined. The results demonstrate that the tethered effector provide a significant effect and reduction in inflammation in a contact hypersensitivity model. These data, illustrated in FIG. 24, demonstrate the efficacy of this tethered molecule.

[0554] The Examples provided herein demonstrate that molecules provided herein can be used to specifically localize therapeutics, such as an IL-2 mutein or PD-1 agonist, and also other therapeutic molecules, such as those described herein.

[0555] The disclosures of each and every patent, patent application, and publication cited herein are hereby incorporated herein by reference in their entirety. While various embodiments have been disclosed with reference to specific aspects, it is apparent that other aspects and variations of these embodiments may be devised by others skilled in the art without departing from the true spirit and scope of the embodiments. The appended claims are intended to be construed to include all such aspects and equivalent variations.

The application's sequence listing, which the Patent Office published only in electronic form, follows.

SEQUENCE LISTING (804 sequences)

SEQ ID NO: 1 - protein, 510 aa, Homo sapiens
MEDTKESNVKTFCSKNILAILGFSSIIAVIALLAVGLTQNKALPENVKYGIVLDAGSSHTSLYIYKWPAEKENDTGVVHQVEECRVKGPGISKFVQKVNEIGIYLTDCMERAREVIPRSQHQETPVYLGATAGMRLLRMESEELADRVLDVVERSLSNYPFDFQGARIITGQEEGAYGWITINYLLGKFSQKTRWFSIVPYETNNQETFGALDLGGASTQVTFVPQNQTIESPDNALQFRLYGKDYNVYTHSFLCYGKDQALWQKLAKDIQVASNEILRDPCFHPGYKKVVNVSDLYKTPCTKRFEMTLPFQQFEIQGIGNYQQCHQSILELFNTSYCPYSQCAFNGIFLPPLQGDFGAFSAFYFVMKFLNLTSEKVSQEKVTEMMKKFCAQPWEEIKTSYAGVKEKYLSEYCFSGTYILSLLLQGYHFTADSWEHIHFIGKIQGSDAGWTLGYMLNLTNMIPAEQPLSTPLSHSTYVFLMVLFSLVLFTVAIIGLLIFHKPSYFWKDMV

SEQ ID NO: 2 - protein, 574 aa, Homo sapiens [sequence omitted]

SEQ ID NO: 3 - protein, 290 aa, Artificial Sequence
  synthetic sequence
MRIFAVFIFMTYWHLLNAFTVTVPKDLYVVEYGSNMTIECKFPVEKQLDLAALIVYWEMEDKNIIQFVHGEEDLKVQHSSYRQRARLLKDQLSLGNAALQITDVKLQDAGVYRCMISYGGADYKRITVKVNAPYNKINQRILVVDPVTSEHELTCQAEGYPKAEVIWTSSDHQVLSGKTTTTNSKREEKLFNVTSTLRINTTTNEIFYCTFRRLDPEENHTAELVIPELPLAHPPNERTHLVILGAILLCLGVALTFIFRLRKGRMMDVKKCGIQDTNSKKQSDTHLEET

SEQ ID NO: 4 - protein, 313 aa, Artificial Sequence
  synthetic sequence
MVVMAPRTLFLLLSGALTLTETWAGSHSMRYFSAAVSRPGRGEPRFIAMGYVDDTQFVRFDSDSACPRMEPRAPWVEQEGPEYWEEETRNTKAHAQTDRMNLQTLRGYYNQSEASSHTLQWMIGCDLGSDGRLLRGYEQYAYDGKDYLALNEDLRSWTAADTAAQISKRKCEAANVAEQRRAYLEGTCVEWLHRYLENGKEMLQRADPPKTHVTHHPVFDYEATLRCWALGFYPAEIILTWQRDGEDQTQDVELVETRPAGDGTFQKWAAVVVPSGEEQRYTCHVQHEGLPEPLMLRWKQSSLPTIPIMGIVA

SEQ ID NO: 5 - protein, 338 aa, Artificial Sequence
  synthetic sequence
MVVMAPRTLFLLLSGALTLTETWAGSHSMRYFSAAVSRPGRGEPRFIAMGYVDDTQFVRFDSDSACPRMEPRAPWVEQEGPEYWEEETRNTKAHAQTDRMNLQTLRGYYNQSEASSHTLQWMIGCDLGSDGRLLRGYEQYAYDGKDYLALNEDLRSWTAADTAAQISKRKCEAANVAEQRRAYLEGTCVEWLHRYLENGKEMLQRADPPKTHVTHHPVFDYEATLRCWALGFYPAEIILTWQRDGEDQTQDVELVETRPAGDGTFQKWAAVVVPSGEEQRYTCHVQHEGLPEPLMLRWKQSSLPTIPIMGIVAGLVVLAAVVTGAAVAAVLWRKKSSD

SEQ ID NO: 6 - protein, 133 aa, Artificial Sequence [sequence omitted]

SEQ ID NO: 7 - protein, 369 aa, Artificial Sequence
  synthetic sequence
APTSSSTKKTQLQLEHLLLDLQMILNGINNYKNPKLTRMLTFKFYMPKKATELKHLQCLEEELKPLEEVLNLAQSKNFHLRPRDLISRINVIVLELKGSETTFMCEYADETATIVEFLNRWITFSQSIISTLTGGGGAGGGGDKTHTCPPCPAPELLGGPSVFLFPPKPKDTLMISRTPEVTCVVVDVSHEDPEVKFNWYVDGVEVHNAKTKPREEQYASTYRVVSVLTVLHQDWLNGKEYKCKVSNKALPAPIEKTISKAKGQPREPQVYTLPPSRDELTKNQVSLTCLVKGFYPSDIAVEWESNGQPENNYKTTPPVLDSDGSFFLYSKLTVDKSRWQQGNVFSCSVMHEALHNHYTQKSLSLSPGK

SEQ ID NO: 8 - protein, 356 aa, Artificial Sequence
  synthetic sequence
APTSSSTKKTQLQLEHLLLHLQMILNGINNYKNPKLTRMLTFKFYMPKKATELKHLQCLEEELKPLEEVLNLAQSKNFHLRPRDLISNINVIVLELKGSETTFMCEYADETATIVEFLNRWITFSQSIISTLTVECPPCPAPPVAGPSVFLFPPKPKDTLMISRTPEVTCVVVDVSHEDPEVQFNWYVDGVEVHNAKTKPREEQFNSTFRVVSVLTVVHQDWLNGKEYKCKVSNKGLPAPIEKTISKTKGQPREPQVYTLPPSREEMTKNQVSLTCLVKGFYPSDIAVEWESNGQPENNYKTTPPMLDSDGSFFLYSKLTVDKSRWQQGNVFSCSVMHEALHNHYTQKSLSLSPGK

SEQ ID NO: 9 - protein, 359 aa, Artificial Sequence
  synthetic sequence
APTSSSTKKTQLQLEHLLLDLQMILNGINNYKNPKLTRMLTFKFYMPKKATELKHLQCLEEELKPLEEVLNLAQSKNFHLRPRDLISRINVIVLELKGSETTFMCEYADETATIVEFLNRWITFSQSIISTLTDKTHTCPPCPAPELLGGPSVFLFPPKPKDTLMISRTPEVTCVVVDVSHEDPEVKFNWYVDGVEVHNAKTKPREEQYASTYRVVSVLTVLHQDWLNGKEYKCKVSNKALPAPIEKTISKAKGQPREPQVYTLPPSRDELTKNQVSLTCLVKGFYPSDIAVEWESNGQPENNYKTTPPVLDSDGSFFLYSKLTVDKSRWQQGNVFSCSVMHEALHNHYTQKSLSLSPG

SEQ ID NO: 10 - protein, 364 aa, Artificial Sequence
  synthetic sequence
APTSSSTKKTQLQLEHLLLDLQMILNGINNYKNPKLTRMLTFKFYMPKKATELKHLQCLEEELKPLEEVLNLAQSKNFHLRPRDLISRINVIVLELKGSETTFMCEYADETATIVEFLNRWITFSQSIISTLTGGGGSDKTHTCPPCPAPELLGGPSVFLFPPKPKDTLMISRTPEVTCVVVDVSHEDPEVKFNWYVDGVEVHNAKTKPREEQYASTYRVVSVLTVLHQDWLNGKEYKCKVSNKALPAPIEKTISKAKGQPREPQVYTLPPSRDELTKNQVSLTCLVKGFYPSDIAVEWESNGQPENNYKTTPPVLDSDGSFFLYSKLTVDKSRWQQGNVFSCSVMHEALHNHYTQKSLSLSPG

SEQ ID NO: 11 - protein, 369 aa, Artificial Sequence
  synthetic sequence
APTSSSTKKTQLQLEHLLLDLQMILNGINNYKNPKLTRMLTFKFYMPKKATELKHLQCLEEELKPLEEVLNLAQSKNFHLRPRDLISRINVIVLELKGSETTFMCEYADETATIVEFLNRWITFSQSIISTLTGGGGSGGGGSDKTHTCPPCPAPELLGGPSVFLFPPKPKDTLMISRTPEVTCVVVDVSHEDPEVKFNWYVDGVEVHNAKTKPREEQYASTYRVVSVLTVLHQDWLNGKEYKCKVSNKALPAPIEKTISKAKGQPREPQVYTLPPSRDELTKNQVSLTCLVKGFYPSDIAVEWESNGQPENNYKTTPPVLDSDGSFFLYSKLTVDKSRWQQGNVFSCSVMHEALHNHYTQKSLSLSPG

SEQ ID NO: 12 - protein, 374 aa, Artificial Sequence
  synthetic sequence
APTSSSTKKTQLQLEHLLLDLQMILNGINNYKNPKLTRMLTFKFYMPKKATELKHLQCLEEELKPLEEVLNLAQSKNFHLRPRDLISRINVIVLELKGSETTFMCEYADETATIVEFLNRWITFSQSIISTLTGGGGSGGGGSGGGGSDKTHTCPPCPAPELLGGPSVFLFPPKPKDTLMISRTPEVTCVVVDVSHEDPEVKFNWYVDGVEVHNAKTKPREEQYASTYRVVSVLTVLHQDWLNGKEYKCKVSNKALPAPIEKTISKAKGQPREPQVYTLPPSRDELTKNQVSLTCLVKGFYPSDIAVEWESNGQPENNYKTTPPVLDSDGSFFLYSKLTVDKSRWQQGNVFSCSVMHEALHNYHTQKSLSLSPG

SEQ ID NO: 13 - protein, 379 aa, Artificial Sequence
  synthetic sequence
APTSSSTKKTQLQLEHLLLDLQMILNGINNYKNPKLTRMLTFKFYMPKKATELKHLQCLEEELKPLEEVLNLAQSKNFHLRPRDLISRINVIVLELKGSETTFMCEYADETATIVEFLNRWITFSQSIISTLTGGGGSGGGGSGGGGSGGGGSDKTHTCPPCPAPELLGGPSVFLFPPKPKDTLMISRTPEVTCVVVDVSHEDPEVKFNWYVDGVEVHNAKTKPREEQYASTYRVVSVLTVLHQDWLNGKEYKCKVSNKALPAPIEKTISKAKGQPREPQVYTLPPSRDELTKNQVSLTCLVKGFYPSDIAVEWESNGQPENNYKTTPPVLDSDGSFFLYSKLTVDKSRWQQGNVFSCSVMHEALHNHYTQKSLSLSPG

SEQ ID NO: 14 - protein, 374 aa, Artificial Sequence
  synthetic sequence
APTSSSTKKTQLQLEHLLLHLQMILNGINNYKNPKLTRMLTFKFYMPKKATELKHLQCLEEELKPLEEVLNLAQSKNFHLRPRDLISNINVIVLELKGSETTFMCEYADETATIVEFLNRWITFSQSIISTLTGGGGSGGGGSGGGGSDKTHTCPPCPAPELLGGPSVFLFPPKPKDTLMISRTPEVTCVVVDVSHEDPEVKFNWYVDGVEVHNAKTKPREEQYASTYPVVSVLTVLHQDWLNGKEYKCKVSNKALPAPIEKTISKAKGQPREPQVYTLPPSRDELTKNQVSLTCLVKGFYPSDIAVEWESNGQPENNYKTTPPVLDSDGSFFLYSKLTVDKSRWQQGNVFSCSVMHEALHNHYTQKSLSLSPG

SEQ ID NO: 15 - protein, 153 aa, Artificial Sequence
  synthetic sequence
MYRMQLLSCIALSLALVTNSAPTSSSTKKTQLQLEHLLLDLQMILNGINNYKNPKLTRMLTFKFYMPKKATELKHLQCLEEELKPLEEVLNLAQSKNFHLRPRDLISNINVIVLELKGSETTFMCEYADETATIVEFLNRWITFCQSIISTLT

SEQ ID NO: 16 - protein, 153 aa, Artificial Sequence
  synthetic sequence
MYRMQLLSCIALSLALVTNSAPTSSSTKKTQLQLEHLLLDLQMILNGISNHKNPRLARMLTFKFYMPEKATEIKHLQCLEEELKPLEEALRLAPSKNFHLRPRDLISDINVIVLELKGSETTFMCEYADETATIVEFLNRWITFSQSIISTLT

SEQ ID NO: 17 - protein, 153 aa, Artificial Sequence
  synthetic sequence
MYRMQLLSCIALSLALVTNSAPTSSSTKKTQLQLEHLLLDLQMILNGISNHKNPRLARMLTFKFYMPEKATELKHIQCLEEELKPLEEALRLAPSKNFHLRPRDLISDINVIVLELKGSETTFMCEYADETATIVEFLNRWITFSQSIISTLT

SEQ ID NO: 18 - protein, 153 aa, Artificial Sequence
  synthetic sequence
MYRMQLLSCIALSLALVTNSAPTSSSTKKTQLQLEHLLLDLQMILNGISNHKNPRLARMLTFKFYMPEKATELKHLQCLEEELKPLEEALRLAPSKNFHIRPRDLISDINVIVLELKGSETTFMCEYADETATIVEFLNRWITFSQSIISTLT

SEQ ID NO: 19 - protein, 153 aa, Artificial Sequence
  synthetic sequence
MYRMQLLSCIALSLALVTNSAPTSSSTKKTQLQLEHLLLDLQMILNGISNHKNPRLARMLTFKFYMPEKATELKHLQCLEEELKPLEEALRLAPSKNFHLRPRDLISDINVIVLELKGSETTFMCEYADETATIVEFINRWITFSQSIISTLT

SEQ ID NO: 20 - protein, 20 aa, Artificial Sequence
  synthetic sequence
MYRMQLLSCIALSLALVTNS

SEQ ID NO: 21 - protein, 226 aa, Artificial Sequence
  synthetic sequence
DKTHTCPPCPAPEAAGAPSVFLFPPKPKDTLMISRTPEVTCVVVDVSHEDPEVKFNWYVDGVEVHNAKTKPREEQYNSTYRVVSVLTVLHQDWLNGKEYKCKVSNKALPAPIEKTISKAKGQPREPQVYTLPPSREEMTKNQVSLTCLVKGFYPSDIAVEWESNGQPENNYKTTPPVLDSDGSFFLYSKLTVDKSRWQQGNVFSCSVMHEALHNHYTQKSLSLSPG

SEQ ID NO: 22 - protein, 20 aa, Artificial Sequence
  synthetic sequence
GGGGSGGGGSGGGGSGGGGS

SEQ ID NO: 23 - protein, 5 aa, Artificial Sequence
  synthetic sequence
GGGGS

SEQ ID NO: 24 - protein, 399 aa, Artificial Sequence
  synthetic sequence
MYRMQLLSCIALSLALVTNSAPTSSSTKKTQLQLEHLLLDLQMILNGISNHKNPRLARMLTFKFYMPEKATEIKHLQCLEEELKPLEEALRLAPSKNFHLRPRDLISDINVIVLELKGSETTFMCEYADETATIVEFLNRWITFSQSIISTLTGGGGSGGGGSGGGGSGGGGSDKTHTCPPCPAPEAAGAPSVFLFPPKPKDTLMISRTPEVTCVVVDVSHEDPEVKFNWYVDGVEVHNAKTKPREEQYNSTYRVVSVLTVLHQDWLNGKEYKCKVSNKALPAPIEKTISKAKGQPREPQVYTLPPSREEMTKNQVSLTCLVKGFYPSDIAVEWESNGQPENNYKTTPPVLDSDGSFFLYSKLTVDKSRWQQGNVFSCSVMHEALHNHYTQKSLSLSPG

SEQ ID NO: 25 - protein, 399 aa, Artificial Sequence
  synthetic sequence
MYRMQLLSCIALSLALVTNSAPTSSSTKKTQLQLEHLLLDLQMILNGISNHKNPRLARMLTFKFYMPEKATELKHIQCLEEELKPLEEALRLAPSKNFHLRPRDLISDINVIVLELKGSETTFMCEYADETATIVEFLNRWITFSQSIISTLTGGGGSGGGGSGGGGSGGGGSDKTHTCPPCPAPEAAGAPSVFLFPPKPKDTLMISRTPEVTCVVVDVSHEDPEVKFNWYVDGVEVHNAKTKPREEQYNSTYRVVSVLTVLHQDWLNGKEYKCKVSNKALPAPIEKTISKAKGQPREPQVYTLPPSREEMTKNQVSLTCLVKGFYPSDIAVEWESNGQPENNYKTTPPVLDSDGSFFLYSKLTVDKSRWQQGNVFSCSVMHEALHNHYTQKSLSLSPG

SEQ ID NO: 26 - protein, 399 aa, Artificial Sequence
  synthetic sequence
MYRMQLLSCIALSLALVTNSAPTSSSTKKTQLQLEHLLLDLQMILNGISNHKNPRLARMLTFKFYMPEKATELKHLQCLEEELKPLEEALRLAPSKNFHIRPRDLISDINVIVLELKGSETTFMCEYADETATIVEFLNRWITFSQSIISTLTGGGGSGGGGSGGGGSGGGGSDKTHTCPPCPAPEAAGAPSVFLFPPKPKDTLMISRTPEVTCVVVDVSHEDPEVKFNWYVDGVEVHNAKTKPREEQYNSTYRVVSVLTVLHQDWLNGKEYKCKVSNKALPAPIEKTISKAKGQPREPQVYTLPPSREEMTKNQVSLTCLVKGFYPSDIAVEWESNGQPENNYKTTPPVLDSDGSFFLYSKLTVDKSRWQQGNVFSCSVMHEALHNHYTQKSLSLSPG

SEQ ID NO: 27 - protein, 399 aa, Artificial Sequence
  synthetic sequence
MYRMQLLSCIALSLALVTNSAPTSSSTKKTQLQLEHLLLDLQMILNGISNHKNPRLARMLTFKFYMPEKATELKHLQCLEEELKPLEEALRLAPSKNFHLRPRDLISDINVIVLELKGSETTFMCEYADETATIVEFINRWITFSQSIISTLTGGGGSGGGGSGGGGSGGGGSDKTHTCPPCPAPEAAGAPSVFLFPPKPKDTLMISRTPEVTCVVVDVSHEDPEVKFNWYVDGVEVHNAKTKPREEQYNSTYRVVSVLTVLHQDWLNGKEYKCKVSNKALPAPIEKTISKAKGQPREPQVYTLPPSREEMTKNQVSLTCLVKGFYPSDIAVEWESNGQPENNYKTTPPVLDSDGSFFLYSKLTVDKSRWQQGNVFSCSVMHEALHNHYTQKSLSLSPG

SEQ ID NO: 28 - protein, 226 aa, Artificial Sequence
  synthetic sequence
DKTHTCPPCPAPELLGGPSVFLFPPKPKDTLMISRTPEVTCVVVDVSHEDPEVKFNWYVDGVEVHNAKTKPREEQYNSTYRVVSVLTVLHQDWLNGKEYKCKVSNKALPAPIEKTISKAKGQPREPQVYTLPPSREEMTKNQVSLTCLVKGFYPSDIAVEWESNGQPENNYKTTPPVLDSDGSFFLYSKLTVDKSRWQQGNVFSCSVMHEALHNHYTQKSLSLSPG

SEQ ID NO: 29 - protein, 5 aa, Artificial Sequence
  synthetic sequence
GGGGA

SEQ ID NO: 30 - protein, 15 aa, Artificial Sequence
  synthetic sequence
GGGGSGGGGSGGGGS

SEQ ID NO: 31 - protein, 133 aa, Artificial Sequence
  synthetic sequence
APTSSSTKKTQLQLEHLLLDLQMILNGINNYKNPKLTRMLTFKFYMPKKATELKHLQCLEEELKPLEEVLNLAQSKNFHLRPRDLISNINVIVLELKGSETTFMCEYADETATIVEFLNRWITFSQSIISTLT

SEQ ID NO: 32 - protein, 133 aa, Artificial Sequence
  synthetic sequence
APASSSTKKTQLQLEHLLLDLQMILNGINNYKNPKLTRMLTFKFYMPKKATELKHLQCLEEELKPLEEVLNLAQSKNFHLRPRDLISNINVIVLELKGSETTFMCEYADETATIVEFLNRWITFSQSIISTLT

SEQ ID NO: 33 - protein, 133 aa, Artificial Sequence
  synthetic sequence
APTSSSTKKTQLQLEHLLLDLQMILNGINNYKNPKLTRMLTFKFYMPKKATELKHLQCLEEELKPLEEVLNLAQSKNFHLRPRDLISRINVIVLELKGSETTFMCEYADETATIVEFLNRWITFSQSIISTLT

SEQ ID NO: 34 - protein, 133 aa, Artificial Sequence [sequence omitted]

SEQ ID NO: 35 - protein, 133 aa, Artificial Sequence
  synthetic sequence
APTSSSTKKTQLQLEHLLLDLQMILNGINNYKNPKLTRMLTFKFYMPKKATELKHLQCLEEELKPLEEALNLAPSKNFHLRPRDLISDINVIVLELKGSETTFMCEYADETATIVEFLNRWITFSQSIISTLT

SEQ ID NO: 36 - protein, 133 aa, Artificial Sequence
  synthetic sequence
APTSSSTKKTQLQLEHLLLDLQMILNGINNYKNPKLTRMLTFKFYMPKKATELKHLQCLEEELKPLEEALNLAPSKNFHLRPRDLISRINVIVLELKGSETTFMCEYADETATIVEFLNRWITFSQSIISTLT

SEQ ID NO: 37 - protein, 133 aa, Artificial Sequence
  synthetic sequence
APTSSSTKKTQLQLEHLLLDLQMILNGINNYKNPKLTRMLTFKFYMPKKATELKHLQCLEEELKPLEEVLNLAQSKNFHLRPRDLISDINVIVLELKGSETTFMCEYADETATIVEFLNRWITFSQSIISTLT

SEQ ID NO: 38 - protein, 133 aa, Artificial Sequence
  synthetic sequence
APTSSSTKKTQLQLEHLLLDLQMILNGINNYKNPKLTRMLTFKFYMPKKATEIKHLQCLEEELKPLEEALNLAPSKNFHLRPRDLISDINVIVLELKGSETTFMCEYADETATIVEFLNRWITFSQSIISTLT

SEQ ID NO: 39 - protein, 133 aa, Artificial Sequence
  synthetic sequence
APTSSSTKKTQLQLEHLLLDLQMILNGINNYKNPKLTRMLTFKFYMPKKATELKHIQCLEEELKPLEEALNLAPSKNFHLRPRDLISDINVIVLELKGSETTFMCEYADETATIVEFLNRWITFSQSIISTLT

SEQ ID NO: 40 - protein, 133 aa, Artificial Sequence
  synthetic sequence
APTSSSTKKTQLQLEHLLLDLQMILNGINNYKNPKLTRMLTFKFYMPKKATELKHLQCLEEELKPLEEALNLAPSKNFHIRPRDLISDINVIVLELKGSETTFMCEYADETATIVEFLNRWITFSQSIISTLT

SEQ ID NO: 41 - protein, 133 aa, Artificial Sequence
  synthetic sequence
APTSSSTKKTQLQLEHLLLDLQMILNGINNYKNPKLTRMLTFKFYMPKKATELKHLQCLEEELKPLEEALNLAPSKNFHLRPRDLISDINVIVLELKGSETTFMCEYADETATIVEFINRWITFSQSIISTLT

SEQ ID NO: 42 - protein, 226 aa, Artificial Sequence; identical to SEQ ID NO: 21
  synthetic sequence

SEQ ID NO: 43 - protein, 226 aa, Artificial Sequence
  synthetic sequence
DKTHTCPPCPAPELLGGPSVFLFPPKPKDTLMISRTPEVTCVVVDVSHEDPEVKFNWYVDGVEVHNAKTKPREEQYGSTYRVVSVLTVLHQDWLNGKEYKCKVSNKALPAPIEKTISKAKGQPREPQVYTLPPSREEMTKNQVSLTCLVKGFYPSDIAVEWESNGQPENNYKTTPPVLDSDGSFFLYSKLTVDKSRWQQGNVFSCSVMHEALHNHYTQKSLSLSPG

SEQ ID NO: 44 - protein, 329 aa, Artificial Sequence
  synthetic sequence
ASTKGPSVFPLAPSSKSTSGGTAALGCLVKDYFPEPVTVSWNSGALTSGVHTFPAVLQSSGLYSLSSVVTVPSSSLGTQTYICNVNHKPSNTKVDKKVEPKSCDKTHTCPPCPAPEAAGAPSVFLFPPKPKDTLMISRTPEVTCVVVDVSHEDPEVKFNWYVDGVEVHNAKTKPREEQYNSTYRVVSVLTVLHQDWLNGKEYKCKVSNKALPAPIEKTISKAKGQPREPQVYTLPPSREEMTKNQVSLTCLVKGFYPSDIAVEWESNGQPENNYKTTPPVLDSDGSFFLYSKLTVDKSRWQQGNVFSCSVMHEALHNHYTQKSLSLSPG

SEQ ID NO: 45 - protein, 107 aa, Artificial Sequence [sequence omitted]

SEQ ID NO: 46 - protein, 374 aa, Artificial Sequence
  synthetic sequence
APTSSSTKKTQLQLEHLLLDLQMILNGINNYKNPKLTRMLTFKFYMPKKATELKHLQCLEEELKPLEEVLNLAQSKNFHLRPRDLISNINVIVLELKGSETTFMCEYADETATIVEFLNRWITFSQSIISTLTGGGGSGGGGSGGGGSDKTHTCPPCPAPEAAGAPSVFLFPPKPKDTLMISRTPEVTCVVVDVSHEDPEVKFNWYVDGVEVHNAKTKPREEQYNSTYRVVSVLTVLHQDWLNGKEYKCKVSNKALPAPIEKTISKAKGQPREPQVYTLPPSREEMTKNQVSLTCLVKGFYPSDIAVEWESNGQPENNYKTTPPVLDSDGSFFLYSKLTVDKSRWQQGNVFSCSVMHEALHNHYTQKSLSLSPG

SEQ ID NO: 47 - protein, 374 aa, Artificial Sequence
  synthetic sequence
APASSSTKKTQLQLEHLLLDLQMILNGINNYKNPKLTRMLTFKFYMPKKATELKHLQCLEEELKPLEEVLNLAQSKNFHLRPRDLISNINVIVLELKGSETTFMCEYADETATIVEFLNRWITFSQSIISTLTGGGGSGGGGSGGGGSDKTHTCPPCPAPEAAGAPSVFLFPPKPKDTLMISRTPEVTCVVVDVSHEDPEVKFNWYVDGVEVHNAKTKPREEQYNSTYRVVSVLTVLHQDWLNGKEYKCKVSNKALPAPIEKTISKAKGQPREPQVYTLPPSREEMTKNQVSLTCLVKGFYPSDIAVEWESNGQPENNYKTTPPVLDSDGSFFLYSKLTVDKSRWQQGNVFSCSVMHEALHNHYTQKSLSLSPG

SEQ ID NO: 48 - protein, 374 aa, Artificial Sequence
  synthetic sequence
APTSSSTKKTQLQLEHLLLDLQMILNGINNYKNPKLTRMLTFKFYMPKKATELKHLQCLEEELKPLEEVLNLAQSKNFHLRPRDLISRINVIVLELKGSETTFMCEYADETATIVEFLNRWITFSQSIISTLTGGGGSGGGGSGGGGSDKTHTCPPCPAPEAAGAPSVFLFPPKPKDTLMISRTPEVTCVVVDVSHEDPEVKFNWYVDGVEVHNAKTKPREEQYNSTYRVVSVLTVLHQDWLNGKEYKCKVSNKALPAPIEKTISKAKGQPREPQVYTLPPSREEMTKNQVSLTCLVKGFYPSDIAVEWESNGQPENNYKTTPPVLDSDGSFFLYSKLTVDKSRWQQGNVFSCSVMHEALHNHYTQKSLSLSPG

SEQ ID NO: 49 - protein, 374 aa, Artificial Sequence
  synthetic sequence
APTSSSTKKTQLQLEHLLLDLQMILNGINNYKNPKLTRMLTFKFYMPKKATELKHLQCLEEELKPLEEALNLAPSKNFHLRPRDLISNINVIVLELKGSETTFMCEYADETATIVEFLNRWITFSQSIISTLTGGGGSGGGGSGGGGSDKTHTCPPCPAPEAAGAPSVFLFPPKPKDTLMISRTPEVTCVVVDVSHEDPEVKFNWYVDGVEVHNAKTKPREEQYNSTYRVVSVLTVLHQDWLNGKEYKCKVSNKALPAPIEKTISKAKGQPREPQVYTLPPSREEMTKNQVSLTCLVKGFYPSDIAVEWESNGQPENNYKTTPPVLDSDGSFFLYSKLTVDKSRWQQGNVFSCSVMHEALHNHYTQKSLSLSPG

SEQ ID NO: 50 - protein, 374 aa, Artificial Sequence
  synthetic sequence
APTSSSTKKTQLQLEHLLLDLQMILNGINNYKNPKLTRMLTFKFYMPKKATELKHLQCLEEELKPLEEALNLAPSKNFHLRPRDLISDINVIVLELKGSETTFMCEYADETATIVEFLNRWITFSQSIISTLTGGGGSGGGGSGGGGSDKTHTCPPCPAPEAAGAPSVFLFPPKPKDTLMISRTPEVTCVVVDVSHEDPEVKFNWYVDGVEVHNAKTKPREEQYNSTYRVVSVLTVLHQDWLNGKEYKCKVSNKALPAPIEKTISKAKGQPREPQVYTLPPSREEMTKNQVSLTCLVKGFYPSDIAVEWESNGQPENNYKTTPPVLDSDGSFFLYSKLTVDKSRWQQGNVFSCSVMHEALHNHYTQKSLSLSPG

SEQ ID NO: 51 - protein, 374 aa, Artificial Sequence
  synthetic sequence
APTSSSTKKTQLQLEHLLLDLQMILNGINNYKNPKLTRMLTFKFYMPKKATELKHLQCLEEELKPLEEALNLAPSKNFHLRPRDLISRINVIVLELKGSETTFMCEYADETATIVEFLNRWITFSQSIISTLTGGGGSGGGGSGGGGSDKTHTCPPCPAPEAAGAPSVFLFPPKPKDTLMISRTPEVTCVVVDVSHEDPEVKFNWYVDGVEVHNAKTKPREEQYNSTYRVVSVLTVLHQDWLNGKEYKCKVSNKALPAPIEKTISKAKGQPREPQVYTLPPSREEMTKNQVSLTCLVKGFYPSDIAVEWESNGQPENNYKTTPPVLDSDGSFFLYSKLTVDKSRWQQGNVFSCSVMHEALHNHYTQKSLSLSPG

SEQ ID NO: 52 - protein, 374 aa, Artificial Sequence
  synthetic sequence
APTSSSTKKTQLQLEHLLLDLQMILNGINNYKNPKLTRMLTFKFYMPKKATELKHLQCLEEELKPLEEVLNLAQSKNFHLRPRDLISDINVIVLELKGSETTFMCEYADETATIVEFLNRWITFSQSIISTLTGGGGSGGGGSGGGGSDKTHTCPPCPAPEAAGAPSVFLFPPKPKDTLMISRTPEVTCVVVDVSHEDPEVKFNWYVDGVEVHNAKTKPREEQYNSTYRVVSVLTVLHQDWLNGKEYKCKVSNKALPAPIEKTISKAKGQPREPQVYTLPPSREEMTKNQVSLTCLVKGFYPSDIAVEWESNGQPENNYKTTPPVLDSDGSFFLYSKLTVDKSRWQQGNVFSCSVMHEALHNHYTQKSLSLSPG

SEQ ID NO: 53 - protein, 379 aa, Artificial Sequence
  synthetic sequence
APTSSSTKKTQLQLEHLLLDLQMILNGINNYKNPKLTRMLTFKFYMPKKATEIKHLQCLEEELKPLEEALNLAPSKNFHLRPRDLISDINVIVLELKGSETTFMCEYADETATIVEFLNRWITFSQSIISTLTGGGGSGGGGSGGGGSGGGGSDKTHTCPPCPAPEAAGAPSVFLFPPKPKDTLMISRTPEVTCVVVDVSHEDPEVKFNWYVDGVEVHNAKTKPREEQYNSTYRVVSVLTVLHQDWLNGKEYKCKVSNKALPAPIEKTISKAKGQPREPQVYTLPPSREEMTKNQVSLTCLVKGFYPSDIAVEWESNGQPENNYKTTPPVLDSDGSFFLYSKLTVDKSRWQQGNVFSCSVMHEALHNHYTQKSLSLSPG

SEQ ID NO: 54 - protein, 379 aa, Artificial Sequence
  synthetic sequence
APTSSSTKKTQLQLEHLLLDLQMILNGINNYKNPKLTRMLTFKFYMPKKATELKHIQCLEEELKPLEEALNLAPSKNFHLRPRDLISDINVIVLELKGSETTFMCEYADETATIVEFLNRWITFSQSIISTLTGGGGSGGGGSGGGGSGGGGSDKTHTCPPCPAPEAAGAPSVFLFPPKPKDTLMISRTPEVTCVVVDVSHEDPEVKFNWYVDGVEVHNAKTKPREEQYNSTYRVVSVLTVLHQDWLNGKEYKCKVSNKALPAPIEKTISKAKGQPREPQVYTLPPSREEMTKNQVSLTCLVKGFYPSDIAVEWESNGQPENNYKTTPPVLDSDGSFFLYSKLTVDKSRWQQGNVFSCSVMHEALHNHYTQKSLSLSPG

SEQ ID NO: 55 - protein, 379 aa, Artificial Sequence
  synthetic sequence
APTSSSTKKTQLQLEHLLLDLQMILNGINNYKNPKLTRMLTFKFYMPKKATELKHLQCLEEELKPLEEALNLAPSKNFHIRPRDLISDINVIVLELKGSETTFMCEYADETATIVEFLNRWITFSQSIISTLTGGGGSGGGGSGGGGSGGGGSDKTHTCPPCPAPEAAGAPSVFLFPPKPKDTLMISRTPEVTCVVVDVSHEDPEVKFNWYVDGVEVHNAKTKPREEQYNSTYRVVSVLTVLHQDWLNGKEYKCKVSNKALPAPIEKTISKAKGQPREPQVYTLPPSREEMTKNQVSLTCLVKGFYPSDIAVEWESNGQPENNYKTTPPVLDSDGSFFLYSKLTVDKSRWQQGNVFSCSVMHEALHNHYTQKSLSLSPG

SEQ ID NO: 56 - protein, 379 aa, Artificial Sequence
  synthetic sequence
APTSSSTKKTQLQLEHLLLDLQMILNGINNYKNPKLTRMLTFKFYMPKKATELKHLQCLEEELKPLEEALNLAPSKNFHLRPRDLISDINVIVLELKGSETTFMCEYADETATIVEFINRWITFSQSIISTLTGGGGSGGGGSGGGGSGGGGSDKTHTCPPCPAPEAAGAPSVFLFPPKPKDTLMISRTPEVTCVVVDVSHEDPEVKFNWYVDGVEVHNAKTKPREEQYNSTYRVVSVLTVLHQDWLNGKEYKCKVSNKALPAPIEKTISKAKGQPREPQVYTLPPSREEMTKNQVSLTCLVKGFYPSDIAVEWESNGQPENNYKTTPPVLDSDGSFFLYSKLTVDKSRWQQGNVFSCSVMHEALHNHYTQKSLSLSPG

SEQ ID NO: 57 - protein, 379 aa, Artificial Sequence
  synthetic sequence
APTSSSTKKTQLQLEHLLLDLQMILNGINNYKNPKLTRMLTFKFYMPKKATELKHLQCLEEELKPLEEALNLAPSKNFHLRPRDLISDINVIVLELKGSETTFMCEYADETATIVEFLNRWITFSQSIISTLTGGGGSGGGGSGGGGSGGGGSDKTHTCPPCPAPEAAGAPSVFLFPPKPKDTLMISRTPEVTCVVVDVSHEDPEVKFNWYVDGVEVHNAKTKPREEQYNSTYRVVSVLTVLHQDWLNGKEYKCKVSNKALPAPIEKTISKAKGQPREPQVYTLPPSREEMTKNQVSLTCLVKGFYPSDIAVEWESNGQPENNYKTTPPVLDSDGSFFLYSKLTVDKSRWQQGNVFSCSVMHEALHNHYTQKSLSLSPG

SEQ ID NO: 58 - protein, 364 aa, Artificial Sequence
  synthetic sequence
DKTHTCPPCPAPELLGGPSVFLFPPKPKDTLMISRTPEVTCVVVDVSHEDPEVKFNWYVDGVEVHNAKTKPREEQYGSTYRVVSVLTVLHQDWLNGKEYKCKVSNKALPAPIEKTISKAKGQPREPQVYTLPPSREEMTKNQVSLTCLVKGFYPSDIAVEWESNGQPENNYKTTPPVLDSDGSFFLYSKLTVDKSRWQQGNVFSCSVMHEALHNHYTQKSLSLSPGGGGGSAPTSSSTKKTQLQLEHLLLDLQMILNGINNYKNPKLTRMLTFKFYMPKKATELKHLQCLEEELKPLEEALNLAPSKNFHLRPRDLISDINVIVLELKGSETTFMCEYADETATIVEFLNRWITFAQSIISTLT

SEQ ID NO: 59 - protein, 379 aa, Artificial Sequence
  synthetic sequence
  MISC_FEATURE (53)..(53): at least one of X1, X2, X3, and X4 is I and the remainder are L or I
  MISC_FEATURE (56)..(56): at least one of X1, X2, X3, and X4 is I and the remainder are L or I
  MISC_FEATURE (80)..(80): at least one of X1, X2, X3, and X4 is I and the remainder are L or I
  MISC_FEATURE (118)..(118): at least one of X1, X2, X3, and X4 is I and the remainder are L or I
APTSSSTKKTQLQLEHLLLDLQMILNGINNYKNPKLTRMLTFKFYMPKKATEXKHXQCLEEELKPLEEALNLAPSKNFHXRPRDLISDINVIVLELKGSETTFMCEYADETATIVEFXNRWITFSQSIISTLTGGGGSGGGGSGGGGSGGGGSDKTHTCPPCPAPEAAGAPSVFLFPPKPKDTLMISRTPEVTCVVVDVSHEDPEVKFNWYVDGVEVHNAKTKPREEQYNSTYRVVSVLTVLHQDWLNGKEYKCKVSNKALPAPIEKTISKAKGQPREPQVYTLPPSREEMTKNQVSLTCLVKGFYPSDIAVEWESNGQPENNYKTTPPVLDSDGSFFLYSKLTVDKSRWQQGNVFSCSVMHEALHNHYTQKSLSLSPG

SEQ ID NO: 60 - protein, 133 aa, Artificial Sequence
  synthetic sequence
  MISC_FEATURE (53)..(53): at least one of X1, X2, X3, and X4 is I and the remainder are L or I
  MISC_FEATURE (56)..(56): at least one of X1, X2, X3, and X4 is I and the remainder are L or I
  MISC_FEATURE (80)..(80): at least one of X1, X2, X3, and X4 is I and the remainder are L or I
  MISC_FEATURE (118)..(118): at least one of X1, X2, X3, and X4 is I and the remainder are L or I
APTSSSTKKTQLQLEHLLLDLQMILNGINNYKNPKLTRMLTFKFYMPKKATEXKHXQCLEEELKPLEEALNLAPSKNFHXRPRDLISDINVIVLELKGSETTFMCEYADETATIVEFXNRWITFSQSIISTLT

SEQ ID NO: 61 - protein, 127 aa, Artificial Sequence
  synthetic sequence
QVQLQESGPGPVKPSGTLSLTCGVSGGSISSNHWWTWVRQPPGKGLEWIGEIYHNGSTFLNPSLKSRVTISVDKSNNQFSLKLTSVTAADTAVYYCARGWHRTGFRGYPSHWYFDLWGRGTLVSVSS

SEQ ID NO: 62 - protein, 109 aa, Artificial Sequence
  synthetic sequence
QSVLTQPPSVSGTPGQRVTISCSGSSSHIGSNYVYWYQQLPGTAPKILIYSNDQRPAGVPDRFSASKSGTSASLAISGLRSEDEADYYCAAWDDGQGGVFGGGTKLTVL

SEQ ID NO: 63 - protein, 713 aa, Artificial Sequence
  synthetic sequence
QVQLVQSGAEVKKPGASVKVSCKASGYSFTTYYMHWVRQAPGQGLEWMGIINPSGGSTSYAQKFQGRVTMTRDTSTSTVYMELSSLRSEDTAVYYCASGWVYWGQGTLVTVSSASTKGPSVFPLAPSSKSTSGGTAALGCLVKDYFPEPVTVSWNSGALTSGVHTFPAVLQSSGLYSLSSVVTVPSSSLGTQTYICNVNHKPSNTKVDKKVEPKSCDKTHTCPPCPAPEAAGAPSVFLFPPKPKDTLMISRTPEVTCVVVDVSHEDPEVKFNWYVDGVEVHNAKTKPREEQYNSTYRVVSVLTVLHQDWLNGKEYKCKVSNKALPAPIEKTISKAKGQPREPQVYTLPPSREEMTKNQVSLTCLVKGFYPSDIAVEWESNGQPENNYKTTPPVLDSDGSFFLYSKLTVDKSRWQQGNVFSCSVMHEALHNHYTQKSLSLSPGGGGGSGGGGSGGGGSQSVLTQPPSVSGTPGQRVTISCSGSSSHIGSNYVYWYQQLPGTAPKILIYSNDQRPAGVPDRFSASKSGTSASLAISGLRSEDEADYYCAAWDDGQGGVFGGGTKLTVLGGGGSGGGGSGGGGSGGGGSQVQLQESGPGPVKPSGTLSLTCGVSGGSISSNHWWTWVRQPPGKGLEWIGEIYHNGSTFLNPSLKSRVTISVDKSNNQFSLKLTSVTAADTAVYYCARGWHRTGFRGYPSHWYFDLWGRGTLVSVSS

SEQ ID NO: 64 - protein, 455 aa, Artificial Sequence
  synthetic sequence
QVQLQESGPGPVKPSGTLSLTCGVSGGSISSNHWWTWVRQPPGKGLEWIGEIYHNGSTFLNPSLKSRVTISVDKSNNQFSLKLTSVTAADTAVYYCARGWHRTGFRGYPSHWYFDLWGRGTLVSVSSASTKGPSVFPLAPSSKSTSGGTAALGCLVKDYFPEPVTVSWNSGALTSGVHTFPAVLQSSGLYSLSSVVTVPSSSLGTQTYICNVNHKPSNTKVDKKVEPKSCDKTHTCPPCPAPEAAGAPSVFLFPPKPKDTLMISRTPEVTCVVVDVSHEDPEVKFNWYVDGVEVHNAKTKPREEQYNSTYRVVSVLTVLHQDWLNGKEYKCKVSNKALPAPIEKTISKAKGQPREPQVYTLPPSREEMTKNQVSLTCLVKGFYPSDIAVEWESNGQPENNYKTTPPVLDSDGSFFLYSKLTVDKSRWQQGNVFSCSVMHEALHNHYTQKSLSLSP

SEQ ID NO: 65 - protein, 215 aa, Artificial Sequence
  synthetic sequence
QSVLTQPPSVSGTPGQRVTISCSGSSSHIGSNYVYWYQQLPGTAPKILIYSNDQRPAGVPDRFSASKSGTSASLAISGLRSEDEADYYCAAWDDGQGGVFGGGTKLTVLGQPKAAPSVTLFPPSSEELQANKATLVCLISDFYPGAVTVAWKADSSPVKAGVETTTPSKQSNNKYAASSYLSLTPEQWKSHRSYSCQVTHEGSTVEKTVAPTECS

SEQ ID NO: 66 - protein, 24 aa, Artificial Sequence
  synthetic sequence
MKWVTFISLLFLFSSAYSRGVFRR

SEQ ID NO: 67 - protein, 585 aa, Artificial Sequence [sequence omitted]

SEQ ID NO: 68 - protein, 15 aa, Artificial Sequence
  synthetic sequence
ALNLAPSKNFHLRPR

SEQ ID NO: 69 - protein, 15 aa, Artificial Sequence
  synthetic sequence
EEALNLAPSKNFHLR

SEQ ID NO: 70 - protein, 15 aa, Artificial Sequence
  synthetic sequence
EALNLAPSKNFHLRP

SEQ ID NO: 71 - protein, 15 aa, Artificial Sequence
  synthetic sequence
EEALNLAPSKNFHLR

SEQ ID NO: 72 - protein, 9 aa, Artificial Sequence
  synthetic sequence
FTFSSYGMH

SEQ ID NO: 73 - protein, 13 aa, Artificial Sequence
  synthetic sequence
AVISDDGSDKYYA

SEQ ID NO: 74 - protein, 15 aa, Artificial Sequence
  synthetic sequence
CTTSKYYYYYGMDVW

SEQ ID NO: 75 - protein, 11 aa, Artificial Sequence
  synthetic sequence
QASQDISKSLN

SEQ ID NO: 76 - protein, 7 aa, Artificial Sequence
  synthetic sequence
AASSLQS

SEQ ID NO: 77 - protein, 11 aa, Artificial Sequence [sequence omitted]

SEQ ID NO: 78 - protein, 247 aa, Artificial Sequence
  synthetic sequence
EVQLLESGGGLVQPGGSLRLSCAASGFTFSSYGMHWVRQAPGKGLEWVAVISDDGSDKYYADSVKGRFTISRDNSKNTLYLQMNSLRAEDTAVYYCTTSKYYYYYGMDVWGQGTTVTVSSGGGGSGGGGSGGGGSGGGGSDIQMTQSPSSLSASVGDRVTITCQASQDISKSLNWYQQKPGKAPKLLIYAASSLQSGVPSRFSGSGSGTDFTLTISSLQPEDFATYYCQQGYSTPLTFGGGTKVEIK

SEQ ID NO: 79 - protein, 9 aa, Artificial Sequence
  synthetic sequence
YPFIGYYLH

SEQ ID NO: 80 - protein, 13 aa, Artificial Sequence
  synthetic sequence
GIINPSGGSTSYA

SEQ ID NO: 81 - protein, 14 aa, Artificial Sequence
  synthetic sequence
CAREGRLSYGMDAW

SEQ ID NO: 82 - protein, 11 aa, Artificial Sequence
  synthetic sequence
RASQSISSYLA

SEQ ID NO: 83 - protein, 7 aa, Artificial Sequence
  synthetic sequence
GASTLES

SEQ ID NO: 84 - protein, 11 aa, Artificial Sequence
  synthetic sequence
CQQTWGPPFTF

SEQ ID NO: 85 - protein, 246 aa, Artificial Sequence
  synthetic sequence
QVQLVQSGAEVKKPGASVKVSCKASGYPFIGYYLHWVRQAPGQGLEWMGIINPSGGSTSYAQKFQGRVTMTRDTSTSTVYMELSSLRSEDTAVYYCAREGRLSYGMDAWGQGTLVTVSSGGGGSGGGGSGGGGSGGGGSDIQMTQSPSSLSASVGDRVTITCRASQSISSYLAWYQQKPGKAPKLLIYGASTLESGVPSRFSGSGSGTDFTLTISSLQPEDFATYYCQQTWGPPFTFGQGTKLEIK

SEQ ID NO: 86 - protein, 9 aa, Artificial Sequence
  synthetic sequence
YPFIGQYLH

SEQ ID NO: 87 - protein, 246 aa, Artificial Sequence
  synthetic sequence
QVQLVQSGAEVKKPGASVKVSCKASGYPFIGQYLHWVRQAPGQGLEWMGIINPSGGSTSYAQKFQGRVTMTRDTSTSTVYMELSSLRSEDTAVYYCAREGRLSYGMDAWGQGTLVTVSSGGGGSGGGGSGGGGSGGGGSDIQMTQSPSSLSASVGDRVTITCRASQSISSYLAWYQQKPGKAPKLLIYGASTLESGVPSRFSGSGSGTDFTLTISSLQPEDFATYYCQQTWGPPFTFGQGTKLEIK

SEQ ID NO: 88 - protein, 9 aa, Artificial Sequence
  synthetic sequence
GTFSSYAIS

SEQ ID NO: 89 - protein, 13 aa, Artificial Sequence
  synthetic sequence
GSINPSGDTTSYA

SEQ ID NO: 90 - protein, 16 aa, Artificial Sequence
  synthetic sequence
CAKDKAQWLVGYFDYW

SEQ ID NO: 91 - protein, 11 aa, Artificial Sequence
  synthetic sequence
QASQDISNSLN

SEQ ID NO: 92 - protein, 11 aa, Artificial Sequence
  synthetic sequence
CQQSYSSVITF

SEQ ID NO: 93 - protein, 9 aa, Artificial Sequence
  synthetic sequence
FTFSSYWMH

SEQ ID NO: 94 - protein, 13 aa, Artificial Sequence
  synthetic sequence
SSISPGGSNIDYA

SEQ ID NO: 95 - protein, 13 aa, Artificial Sequence
  synthetic sequence
CAREVQLSHYDYW

SEQ ID NO: 96 - protein, 11 aa, Artificial Sequence
  synthetic sequence
RASQGISNSLA

SEQ ID NO: 97 - protein, 7 aa, Artificial Sequence
  synthetic sequence
GASSLQS

SEQ ID NO: 98 - protein, 11 aa, Artificial Sequence [sequence omitted]

SEQ ID NO: 99 - protein, 245 aa, Artificial Sequence
  synthetic sequence
EVQLLESGGGLVQPGGSLRLSCAASGFTFSSYWMHWVRQAPGKGLEWVSSISPGGSNIDYADSVKGRFTISRDNSKNTLYLQMNSLRAEDTAVYYCAREVQLSHYDYWGQGTLVTVSSGGGGSGGGGSGGGGSGGGGSDIQMTQSPSSLSASVGDRVTITCRASQGISNSLAWYQQKPGKAPKLLIYGASSLQSGVPSRFSGSGSGTDFTLTISSLQPEDFATYYCQQANSFPFTFGQGTKVEIK

SEQ ID NO: 100 - protein, 9 aa, Artificial Sequence
  synthetic sequence
FTFNNYAFH

SEQ ID NO: 101 - protein, 13 aa, Artificial Sequence
  synthetic sequence
SRINSYGTSTTYA

SEQ ID NO: 102 - protein, 16 aa, Artificial Sequence
  synthetic sequence
CAREGPVAGYWYFDLW

SEQ ID NO: 103 - protein, 11 aa, Artificial Sequence
  synthetic sequence
RASQIIGTNLA

SEQ ID NO: 104 - protein, 11 aa, Artificial Sequence [sequence omitted]

SEQ ID NO: 105 - protein, 248 aa, Artificial Sequence
  synthetic sequence
EVQLLESGGGLVQPGGSLRLSCAASGFTFNNYAFHWVRQAPGKGLEWVSRINSYGTSTTYADSVKGRFTISRDNSKNTLYLQMNSLRAEDTAVYYCAREGPVAGYWYFDLWGQGTLVTVSSGGGGSGGGGSGGGGSGGGGSDIQMTQSPSSLSASVGDRVTITCRASQIIGTNLAWYQQKPGKAPKLLIYGASSLQSGVPSRFSGSGSGTDFTLTISSLQPEDFATYYCQQSYRLPFTFGQGTKVEIK

SEQ ID NO: 106 - protein, 9 aa, Artificial Sequence
  synthetic sequence
YTFTGYHIH

SEQ ID NO: 107 - protein, 13 aa, Artificial Sequence
  synthetic sequence
GIINPSGGSTIYA

SEQ ID NO: 108 - protein, 16 aa, Artificial Sequence
  synthetic sequence
CAKDWSSWYLGPFDYW

SEQ ID NO: 109 - protein, 11 aa, Artificial Sequence
  synthetic sequence
RASQNISSSLN

SEQ ID NO: 110 - protein, 11 aa, Artificial Sequence [sequence omitted]

SEQ ID NO: 111 - protein, 248 aa, Artificial Sequence
  synthetic sequence
QVQLVQSGAEVKKPGASVKVSCKASGYTFTGYHIHWVRQAPGQGLEWMGIINPSGGSTIYAQKFQGRVTMTRDTSTSTVYMELSSLRSEDTAVYYCAKDWSSWYLGPFDYWGQGTLVTVSSGGGGSGGGGSGGGGSGGGGSDIQMTQSPSSLSASVGDRVTITCRASQNISSSLNWYQQKPGKAPKLLIYAASSLQSGVPSRFSGSGSGTDFTLTISSLQPEDFATYYCQQSYTTPYTFGQGTKVEIK

SEQ ID NO: 112 - protein, 9 aa, Artificial Sequence
  synthetic sequence
FMFGDYAMH

SEQ ID NO: 113 - protein, 13 aa, Artificial Sequence
  synthetic sequence
SAISGSGGSTYYA

SEQ ID NO: 114 - protein, 16 aa, Artificial Sequence
  synthetic sequence
CAKDLVVAGIWYFDLW

SEQ ID NO: 115 - protein, 11 aa, Artificial Sequence
  synthetic sequence
RASQGISNNLN

SEQ ID NO: 116 - protein, 7 aa, Artificial Sequence
  synthetic sequence
DASSLES

SEQ ID NO: 117 - protein, 11 aa, Artificial Sequence [sequence omitted]

SEQ ID NO: 118 - protein, 248 aa, Artificial Sequence
  synthetic sequence
EVQLLESGGGLVQPGGSLRLSCAASGFMFGDYAMHWVRQAPGKGLEWVSAISGSGGSTYYADSVKGRFTISRDNSKNTLYLQMNSLRAEDTAVYYCAKDLVVAGIWYFDLWGRGTLVTVSSGGGGSGGGGSGGGGSGGGGSDIQMTQSPSSLSASVGDRVTITCRASQGISNNLNWYQQKPGKAPKLLIYDASSLESGVPSRFSGSGSGTDFTLTISSLQPEDFATYYCQQTHSFPSTFGQGTKLEIK

SEQ ID NO: 119 - protein, 9 aa, Artificial Sequence
  synthetic sequence
FTFSDYYMN

SEQ ID NO: 120 - protein, 13 aa, Artificial Sequence
  synthetic sequence
SVIGESGGSTYYA

SEQ ID NO: 121 - protein, 18 aa, Artificial Sequence
  synthetic sequence
CAADPVSRWPKHGGGDYW

SEQ ID NO: 122 - protein, 11 aa, Artificial Sequence
  synthetic sequence
RASQGISSSLA

SEQ ID NO: 123 - protein, 7 aa, Artificial Sequence
  synthetic sequence
AASTLQS

SEQ ID NO: 124 - protein, 11 aa, Artificial Sequence [sequence omitted]

SEQ ID NO: 125 - protein, 250 aa, Artificial Sequence
  synthetic sequence
EVQLLESGGGLVQPGGSLRLSCAASGFTFSDYYMNWVRQAPGKGLEWVSVIGESGGSTYYADSVKGRFTISRDNSKNTLYLQMNSLRAEDTAVYYCAADPVSRWPKHGGGDYWGQGTLVTVSSGGGGSGGGGSGGGGSGGGGSDIQMTQSPSSLSASVGDRVTITCRASQGISSSLAWYQQKPGKAPKLLIYAASTLQSGVPSRFSGSGSGTDFTLTISSLQPEDFATYYCQQSYSTPWTFGQGTKVEIK

SEQ ID NO: 126 - protein, 9 aa, Artificial Sequence
  synthetic sequence
YTLTTWYMY

SEQ ID NO: 127 - protein, 13 aa, Artificial Sequence
  synthetic sequence
GWINPNRGATNYA

SEQ ID NO: 128 - protein, 13 aa, Artificial Sequence
  synthetic sequence
CAKGDLWGAMDVW

SEQ ID NO: 129 - protein, 11 aa, Artificial Sequence
  synthetic sequence
RASDNIGSWLA

SEQ ID NO: 130 - protein, 11 aa, Artificial Sequence [sequence omitted]

SEQ ID NO: 131 - protein, 245 aa, Artificial Sequence
  synthetic sequence
QVQLVQSGAEVKKPGASVKVSCKASGYTLTTWYMYWVRQAPGQGLEWMGWINPNRGATNYAQKFQGRVTMTRDTSTSTVYMELSSLRSEDTAVYYCAKGDLWGAMDVWGQGTLVTVSSGGGGSGGGGSGGGGSGGGGSDIQMTQSPSSLSASVGDRVTITCRASDNIGSWLAWYQQKPGKAPKLLIYAASSLQSGVPSRFSGSGSGTDFTLTISSLQPEDFATYYCQQGYSTPPTFGQGTKVEIK

SEQ ID NO: 132 - protein, 9 aa, Artificial Sequence
  synthetic sequence
YTFTTYYMH

SEQ ID NO: 133 - protein, 13 aa, Artificial Sequence
  synthetic sequence
GGFDPEDGETIYA

SEQ ID NO: 134 - protein, 22 aa, Artificial Sequence
  synthetic sequence
CARHAVAGAVGAGYYYYGMDVW

SEQ ID NO: 135 - protein, 11 aa, Artificial Sequence
  synthetic sequence
RASESISNWLA

SEQ ID NO: 136 - protein, 11 aa, Artificial Sequence [sequence omitted]

SEQ ID NO: 137 - protein, 254 aa, Artificial Sequence
  synthetic sequence
QVQLVQSGAEVKKPGASVKVSCKASGYTFTTYYMHWVRQAPGQGLEWMGGFDPEDGETIYAQKFQGRVTMTRDTSTSTVYMELSSLRSEDTAVYYCARHAVAGAVGAGYYYYGMDVWGQGTMVTVSSGGGGSGGGGSGGGGSGGGGSDIQMTQSPSSLSASVGDRVTITCRASESISNWLAWYQQKPGKAPKLLIYAASTLQSGVPSRFSGSGSGTDFTLTISSLQPEDFATYYCQQSYSVPFTFGPGTKVDIK

SEQ ID NO: 138 - protein, 9 aa, Artificial Sequence
  synthetic sequence
YTFTGYYMH

SEQ ID NO: 139 - protein, 13 aa, Artificial Sequence
  synthetic sequence
GWIGPNSGDTNYA

SEQ ID NO: 140 - protein, 14 aa, Artificial Sequence
  synthetic sequence
CARDLDHNWYFDLW

SEQ ID NO: 141 - protein, 16 aa, Artificial Sequence
  synthetic sequence
RSSQSLLHSNGYNYLD

SEQ ID NO: 142 - protein, 7 aa, Artificial Sequence
  synthetic sequence
SSSNRAP

SEQ ID NO: 143 - protein, 11 aa, Artificial Sequence [sequence omitted]

SEQ ID NO: 144 - protein, 251 aa, Artificial Sequence
  synthetic sequence
QVQLVQSGAEVKKPGASVKVSCKASGYTFTGYYMHWVRQAPGQGLEWMGWIGPNSGDTNYAQKFQGRVTMTRDTSTSTVYMELSSLRSEDTAVYYCARDLDHNWYFDLWGRGTLVTVSSGGGGSGGGGSGGGGSGGGGSDIVMTQSPLSLPVTPGEPASISCRSSQSLLHSNGYNYLDWYLQKPGQSPQLLIYSSSNRAPGVPDRFSGSGSGTDFTLKISRVEAEDVGVYYCMQALHIPLTFGGGTKVEIK

SEQ ID NO: 145 - protein, 9 aa, Artificial Sequence
  synthetic sequence
FTFDDYAMH

SEQ ID NO: 146 - protein, 13 aa, Artificial Sequence
  synthetic sequence
SYIDASGTTIYYA

SEQ ID NO: 147 - protein, 16 aa, Artificial Sequence
  synthetic sequence
CAKDQAAAGYWYFDLW

SEQ ID NO: 148 - protein, 11 aa, Artificial Sequence
  synthetic sequence
QASQDISNYLN

SEQ ID NO: 149 - protein, 7 aa, Artificial Sequence
  synthetic sequence
KASTLES

SEQ ID NO: 150 - protein, 11 aa, Artificial Sequence [sequence omitted]

SEQ ID NO: 151 - protein, 248 aa, Artificial Sequence
  synthetic sequence
EVQLLESGGGLVQPGGSLRLSCAASGFTFDDYAMHWVRQAPGKGLEWVSYIDASGTTIYYADSVKGRFTISRDNSKNTLYLQMNSLRAEDTAVYYCAKDQAAAGYWYFDLWGRGTLVTVSSGGGGSGGGGSGGGGSGGGGSDIQMTQSPSSLSASVGDRVTITCQASQDISNYLNWYQQKPGKAPKLLIYKASTLESGVPSRFSGSGSGTDFTLTISSLQPEDFATYYCQQSYSTPITFGQGTRLEIK

SEQ ID NO: 152 - protein, 9 aa, Artificial Sequence
  synthetic sequence
YTFTDYHIH

SEQ ID NO: 153 - protein, 13 aa, Artificial Sequence
  synthetic sequence
GGIVPRSGSTTYA

SEQ ID NO: 154 - protein, 15 aa, Artificial Sequence
  synthetic sequence
CAKDESSGWYYFDYW

SEQ ID NO: 155 - protein, 7 aa, Artificial Sequence
  synthetic sequence
SAYNRAS

SEQ ID NO: 156 - protein, 11 aa, Artificial Sequence [sequence omitted]

SEQ ID NO: 157 - protein, 252 aa, Artificial Sequence
  synthetic sequence
QVQLVQSGAEVKKPGSSVKVSCKASGYTFTDYHIHWVRQAPGQGLEWMGGIVPRSGSTTYAQKFQGRVTITADESTSTAYMELSSLRSEDTAVYYCAKDESSGWYYFDYWGQGTLVTVSSGGGGSGGGGSGGGGSGGGGSDIVMTQSPLSLPVTPGEPASISCRSSQSLLHSNGYNYLDWYLQKPGQSPQLLIYSAYNRASGVPDRFSGSGSGTDFTLKISRVEAEDVGVYYCMQALQTPLTFGQGTKVEIK

SEQ ID NO: 158 - protein, 9 aa, Artificial Sequence
  synthetic sequence
YTFTNYYMH

SEQ ID NO: 159 - protein, 13 aa, Artificial Sequence
  synthetic sequence
GGIIPIVDRVKYA

SEQ ID NO: 160 - protein, 17 aa, Artificial Sequence
  synthetic sequence
CAKGRYTVNYYYGMDVW

SEQ ID NO: 161 - protein, 11 aa, Artificial Sequence
  synthetic sequence
QANQDISNYLN

SEQ ID NO: 162 - protein, 7 aa, Artificial Sequence
  synthetic sequence
RASKLEA

SEQ ID NO: 163 - protein, 11 aa, Artificial Sequence
  synthetic sequence
CQQSSEIPYSF

SEQ ID NO: 164 - protein, 249 aa, Artificial Sequence
  synthetic sequence
QVQLVQSGAEVKKPGSSVKVSCKASGYTFTNYYMHWVRQAPGQGLEWMGGIIPIVDRVKYAQKFQGRVTITADESTSTAYMELSSLRSEDTAVYYCAKGRYTVNYYYGMDVWGQGTTVTVSSGGGGSGGGGSGGGGSGGGGSDIQMTQSPSSLSASVGDRVTITCQANQDISNYLNWYQQKPGKAPKLLIYRASKLEAGVPSRFSGSGSGTDFTLTISSLQPEDFATYYCQQSSEIPYSFGQGTKLEIK

SEQ ID NO: 165 - protein, 9 aa, Artificial Sequence
  synthetic sequence
FTFEDYAMH

SEQ ID NO: 166 - protein, 13 aa, Artificial Sequence
  synthetic sequence
SYLNSDGGSTSYA

SEQ ID NO: 167 - protein, 16 aa, Artificial Sequence
  synthetic sequence
CAKDYCTNGVCAFDYW

SEQ ID NO: 168 - protein, 11 aa, Artificial Sequence
  synthetic sequence
RASQSISTYLN

SEQ ID NO: 169 - protein, 7 aa, Artificial Sequence
  synthetic sequence
DASNLET

SEQ ID NO: 170 - protein, 11 aa, Artificial Sequence [sequence omitted]

SEQ ID NO: 171 - protein, 248 aa, Artificial Sequence
  synthetic sequence
EVQLLESGGGLVQPGGSLRLSCAASGFTFEDYAMHWVRQAPGKGLEWVSYLNSDGGSTSYADSVKGRFTISRDNSKNTLYLQMNSLRAEDTAVYYCAKDYCTNGVCAFDYWGQGTLVTVSSGGGGSGGGGSGGGGSGGGGSDIQMTQSPSSLSASVGDRVTITCRASQSISTYLNWYQQKPGKAPKLLIYDASNLETGVPSRFSGSGSGTDFTLTISSLQPEDFATYYCQQSYTIPITFGQGTRLEIK

SEQ ID NO: 172 - protein, 9 aa, Artificial Sequence
  synthetic sequence
FTFSDSAMH

SEQ ID NO: 173 - protein, 13 aa, Artificial Sequence
  synthetic sequence
SAISGSGSTIYYA

SEQ ID NO: 174 - protein, 16 aa, Artificial Sequence
  synthetic sequence
CVSDIAVAGHWYFDLW

SEQ ID NO: 175 - protein, 11 aa, Artificial Sequence
  synthetic sequence
RASQSISTFLN

SEQ ID NO: 176 - protein, 7 aa, Artificial Sequence
  synthetic sequence
AASRLEG

SEQ ID NO: 177 - protein, 11 aa, Artificial Sequence [sequence omitted]

SEQ ID NO: 178 - protein, 248 aa, Artificial Sequence
  synthetic sequence
EVQLLESGGGLVQPGGSLRLSCAASGFTFSDSAMHWVRQAPGKGLEWVSAISGSGSTIYYADSVKGRFTISRDNSKNTLYLQMNSLRAEDTAVYYCVSDIAVAGHWYFDLWGRGTLVTVSSGGGGSGGGGSGGGGSGGGGSDIQMTQSPSSLSASVGDRVTITCRASQSISTFLNWYQQKPGKAPKLLIYAASRLEGGVPSRFSGSGSGTDFTLTISSLQPEDFATYYCQQANSFPLTFGPGTKVDIK

SEQ ID NO: 179 - protein, 9 aa, Artificial Sequence
  synthetic sequence
FTFSSYWMS

SEQ ID NO: 180 - protein, 13 aa, Artificial Sequence
  synthetic sequence
SYISGDSGYTNYA

SEQ ID NO: 181 - protein, 17 aa, Artificial Sequence
  synthetic sequence
CARANSSGWYDWYFDLW

SEQ ID NO: 182 - protein, 11 aa, Artificial Sequence
  synthetic sequence
RASQSISSYLN

SEQ ID NO: 183 - protein, 11 aa, Artificial Sequence [sequence omitted]

SEQ ID NO: 184 - protein, 249 aa, Artificial Sequence
  synthetic sequence
EVQLVESGGGLVKPGGSLRLSCAASGFTFSSYWMSWVRQAPGKGLEWVSYISGDSGYTNYAAPVKGRFTISRDDSKNTLYLQMNSLKTEDTAVYYCARANSSGWYDWYFDLWGRGTLVTVSSGGGGSGGGGSGGGGSGGGGSDIQMTQSPSSLSASVGDRVTITCRASQSISSYLNWYQQKPGKAPKLLIYAASSLQSGVPSRFSGSGSGTDFTLTISSLQPEDFATYYCQQSYSTPLTFGGGTKVEIK

SEQ ID NO: 185 - protein, 13 aa, Artificial Sequence
  synthetic sequence
SGISWNSGSIGYA

SEQ ID NO: 186 - protein, 18 aa, Artificial Sequence
  synthetic sequence
CAKDIVAAGHYYYGMDVW

SEQ ID NO: 187 - protein, 250 aa, Artificial Sequence
  synthetic sequence
EVQLLESGGGLVQPGGSLRLSCAASGFTFDDYAMHWVRQAPGKGLEWVSGISWNSGSIGYADSVKGRFTISRDNSKNTLYLQMNSLRAEDTAVYYCAKDIVAAGHYYYGMDVWGQGTTVTVSSGGGGSGGGGSGGGGSGGGGSDIQMTQSPSSLSASVGDRVTITCQASQDISNYLNWYQQKPGKAPKLLIYDASNLETGVPSRFSGSGSGTDFTLTISSLQPEDFATYYCQQSYSTPLTFGGGTKVEIK

SEQ ID NO: 188 - protein, 13 aa, Artificial Sequence
  synthetic sequence
SYIDTSSSHLYYA

SEQ ID NO: 189 - protein, 16 aa, Artificial Sequence
  synthetic sequence
CARDEAAAGYYGMDVW

SEQ ID NO: 190 - protein, 11 aa, Artificial Sequence
  synthetic sequence
QAGQDISNYLN

SEQ ID NO: 191 - protein, 11 aa, Artificial Sequence [sequence omitted]

SEQ ID NO: 192 - protein, 248 aa, Artificial Sequence
  synthetic sequence
EVQLLESGGGLVQPGGSLRLSCAASGFTFDDYAMHWVRQAPGKGLEWVSYIDTSSSHLYYADSVKGRFTISRDNSKNTLYLQMNSLRAEDTAVYYCARDEAAAGYYGMDVWGQGTTVTVSSGGGGSGGGGSGGGGSGGGGSDIQMTQSPSSLSASVGDRVTITCQAGQDISNYLNWYQQKPGKAPKLLIYDASNLETGVPSRFSGSGSGTDFTLTISSLQPEDFATYYCQQTYSTPITFGQGTKLEIK

SEQ ID NO: 193 - protein, 9 aa, Artificial Sequence
  synthetic sequence
FTFSNAWMS

SEQ ID NO: 194 - protein, 13 aa, Artificial Sequence
  synthetic sequence
STIVGNGGATYYA

SEQ ID NO: 195 - protein, 15 aa, Artificial Sequence
  synthetic sequence
CARDNPLRWQGMDVW

SEQ ID NO: 196 - protein, 11 aa, Artificial Sequence
  synthetic sequence
RASQDISNYLN

SEQ ID NO: 197 - protein, 11 aa, Artificial Sequence [sequence omitted]

SEQ ID NO: 198 - protein, 247 aa, Artificial Sequence
  synthetic sequence
EVQLLESGGGLVQPGGSLRLSCAASGFTFSNAWMSWVRQAPGKGLEWVSTIVGNGGATYYADSVKGRFTISRDNSKNTLYLQMNSLRAEDTAVYYCARDNPLRWQGMDVWGQGTLVTVSSGGGGSGGGGSGGGGSGGGGSDIQMTQSPSSLSASVGDRVTITCRASQDISNYLNWYQQKPGKAPKLLIYAASSLQSGVPSRFSGSGSGTDFTLTISSLQPEDFATYYCQQSYSIPPTFGPGTKVDIK

SEQ ID NO: 199 - protein, 9 aa, Artificial Sequence
  synthetic sequence
FTFSSYQMS

SEQ ID NO: 200 - protein, 13 aa, Artificial Sequence
  synthetic sequence
SYISSSSTYTNYA

SEQ ID NO: 201 - protein, 17 aa, Artificial Sequence
  synthetic sequence
CARANSSSWYDWYFDLW

SEQ ID NO: 202 - protein, 249 aa, Artificial Sequence
  synthetic sequence
EVQLLESGGGLVQPGGSLRLSCAASGFTFSSYQMSWVRQAPGKGLEWVSYISSSSTYTNYADSVKGRFTISRDNSKNTLYLQMNSLRAEDTAVYYCARANSSSWYDWYFDLWGQGTLVTVSSGGGGSGGGGSGGGGSGGGGSDIQMTQSPSSLSASVGDRVTITCRASQSISSYLNWYQQKPGKAPKLLIYAASSLQSGVPSRFSGSGSGTDFTLTISSLQPEDFATYYCQQSYSTPLTFGGGTKVEIK

SEQ ID NO: 203 - protein, 9 aa, Artificial Sequence
  synthetic sequence
FTFSSYAMH

SEQ ID NO: 204 - protein, 13 aa, Artificial Sequence
  synthetic sequence
SGISGSGGSAYYA

SEQ ID NO: 205 - protein, 18 aa, Artificial Sequence
  synthetic sequence
CATSQAPVDYYYYGMDVW

SEQ ID NO: 206 - protein, 11 aa, Artificial Sequence
  synthetic sequence
RASQSISSWLA

SEQ ID NO: 207 - protein, 7 aa, Artificial Sequence
  synthetic sequence
AASNLQR

SEQ ID NO: 208 - protein, 11 aa, Artificial Sequence [sequence omitted]

SEQ ID NO: 209 - protein, 250 aa, Artificial Sequence
  synthetic sequence
EVQLLESGGGLVQPGGSLRLSCAASGFTFSSYAMHWVRQAPGKGLEWVSGISGSGGSAYYADSVKGRFTISRDNSKNTLYLQMNSLRAEDTAVYYCATSQAPVDYYYYGMDVWGQGTTVTVSSGGGGSGGGGSGGGGSGGGGSDIQMTQSPSSLSASVGDRVTITCRASQSISSWLAWYQQKPGKAPKLLIYAASNLQRGVPSRFSGSGSGTDFTLTISSLQPEDFATYYCQQSYSIPITFGQGTKVEIK

SEQ ID NO: 210 - protein, 13 aa, Artificial Sequence
  synthetic sequence
SYISGSSSYTNYA

SEQ ID NO: 211 - protein, 17 aa, Artificial Sequence
  synthetic sequence
CARVGSSGWYDWYFDLW

SEQ ID NO: 212 - protein, 249 aa, Artificial Sequence
  synthetic sequence
EVQLVESGGGLVKPGGSLRLSCAASGFTFSSYWMSWVRQAPGKGLEWVSYISGSSSYTNYAAPVKGRFTISRDDSKNTLYLQMNSLKTEDTAVYYCARVGSSGWYDWYFDLWGRGTLVTVSSGGGGSGGGGSGGGGSGGGGSDIQMTQSPSSLSASVGDRVTITCRASQSISSYLNWYQQKPGKAPKLLIYAASSLQSGVPSRFSGSGSGTDFTLTISSLQPEDFATYYCQQSYSTPLTFGQGTKVEIK

SEQ ID NO: 213 - protein, 245 aa, Artificial Sequence
  synthetic sequence
QVQLVQSGAEVKKPGASVKVSCKASGYTLTTWYMYWVRQAPGQGLEWMGWINPNRGATNYAQKFQGRVTMTRDTSTSTVYMELSSLRSEDTAVYYCAKGDLWGAMDVWGQGTTVTVSSGGGGSGGGGSGGGGSGGGGSDIQMTQSPSSLSASVGDRVTITCRASDNIGSWLAWYQQKPGKAPKLLIYAASSLQSGVPSRFSGSGSGTDFTLTISSLQPEDFATYYCQQGYSTPPTFGQGTKVEIK

SEQ ID NO: 214 - protein, 9 aa, Artificial Sequence
  synthetic sequence
YTFTGYYIH

SEQ ID NO: 215 - protein, 13 aa, Artificial Sequence
  synthetic sequence
GWMNPNSGNTGYA

SEQ ID NO: 216 - protein, 24 aa, Artificial Sequence
  synthetic sequence
CARDPGFLGYCSGGSCYDGWFDPW

SEQ ID NO: 217 - protein, 11 aa, Artificial Sequence
  synthetic sequence
RASQSISSYLH

SEQ ID NO: 218 - protein, 11 aa, Artificial Sequence [sequence omitted]

SEQ ID NO: 219 - protein, 256 aa, Artificial Sequence
  synthetic sequence
QVQLVQSGAEVKKPGASVKVSCKASGYTFTGYYIHWVRQAPGQGLEWMGWMNPNSGNTGYAQKFQGRVTMTRDTSTSTVYMELSSLRSEDTAVYYCARDPGFLGYCSGGSCYDGWFDPWGQGTLVTVSSGGGGSGGGGSGGGGSGGGGSDIQMTQSPSSLSASVGDRVTITCRASQSISSYLHWYQQKPGKAPKLLIYAASSLQSGVPSRFSGSGSGTDFTLTISSLQPEDFATYYCQQSYTAPYTFGQGTKLEIK

SEQ ID NO: 220 - protein, 9 aa, Artificial Sequence
  synthetic sequence
YTFTDYFLH

SEQ ID NO: 221 - protein, 13 aa, Artificial Sequence
  synthetic sequence
GWMNPTSGNTGYA

SEQ ID NO: 222 - protein, 13 aa, Artificial Sequence
  synthetic sequence
CAREGEGSGFDYW

SEQ ID NO: 223 - protein, 11 aa, Artificial Sequence
  synthetic sequence
RASQGINSWLA

SEQ ID NO: 224 - protein, 245 aa, Artificial Sequence
  synthetic sequence
QVQLVQSGAEVKKPGASVKVSCKASGYTFTDYFLHWVRQAPGQGLEWMGWMNPTSGNTGYAQKFQGRVTMTRDTSTSTVYMELSSLRSEDTAVYYCAREGEGSGFDYWGQGTLVTVSSGGGGSGGGGSGGGGSGGGGSDIQMTQSPSSLSASVGDRVTITCRASQGINSWLAWYQQKPGKAPKLLIYDASNLETGVPSRFSGSGSGTDFTLTISSLQPEDFATYYCQQSYSTPLTFGGGTKVEIK

SEQ ID NO: 225 - protein, 9 aa, Artificial Sequence
  synthetic sequence
YTFTSYYMH

SEQ ID NO: 226 - protein, 13 aa, Artificial Sequence
  synthetic sequence
AWMNPNSGNTGYA

SEQ ID NO: 227 - protein, 15 aa, Artificial Sequence
  synthetic sequence
CARDYDFWSGSLGYW

SEQ ID NO: 228 - protein, 11 aa, Artificial Sequence
  synthetic sequence
RASQGISNYLA

SEQ ID NO: 229 - protein, 247 aa, Artificial Sequence
  synthetic sequence
QVQLVQSGAEVKKPGASVKVSCKASGYTFTSYYMHWVRQAPGQGLEWMAWMNPNSGNTGYAQKFQGRVTMTRDTSTSTVYMELSSLRSEDTAVYYCARDYDFWSGSLGYWGQGTLVTVSSGGGGSGGGGSGGGGSGGGGSDIQMTQSPSSLSASVGDRVTITCRASQGISNYLAWYQQKPGKAPKLLIYAASSLQSGVPSRFSGSGSGTDFTLTISSLQPEDFATYYCQQSYSTPWTFGQGTKVEIK

SEQ ID NO: 230 - protein, 245 aa, Artificial Sequence; identical to SEQ ID NO: 131
  synthetic sequence

SEQ ID NO: 231 - protein, 20 aa, Artificial Sequence
  synthetic sequence
CARDTGYSYGRYYYYGMDVW

SEQ ID NO: 232 - protein, 11 aa, Artificial Sequence
  synthetic sequence
RASQSIGRWLA

SEQ ID NO: 233 - protein, 7 aa, Artificial Sequence
  synthetic sequence
DASNLQS

SEQ ID NO: 234 - protein, 252 aa, Artificial Sequence
  synthetic sequence
QVQLVQSGAEVKKPGASVKVSCKASGYTFTSYYMHWVRQAPGQGLEWMGIINPSGGSTSYAQKFQGRVTMTRDTSTSTVYMELSSLRSEDTAVYYCARDTGYSYGRYYYYGMDVWGQGTLVTVSSGGGGSGGGGSGGGGSGGGGSDIQMTQSPSSLSASVGDRVTITCRASQSIGRWLAWYQQKPGKAPKLLIYDASNLQSGVPSRFSGSGSGTDFTLTISSLQPEDFATYYCQQSYSIPITFGQGTKVEIK

SEQ ID NO: 235 - protein, 9 aa, Artificial Sequence
  synthetic sequence
YTLTDYYMH

SEQ ID NO: 236 - protein, 16 aa, Artificial Sequence
  synthetic sequence
CAREEYSSSSGYFDYW

SEQ ID NO: 237 - protein, 11 aa, Artificial Sequence
  synthetic sequence
RASQGISSWLA

SEQ ID NO: 238 - protein, 248 aa, Artificial Sequence
  synthetic sequence
QVQLVQSGAEVKKPGASVKVSCKASGYTLTDYYMHWVRQAPGQGLEWMGIINPSGGSTSYAQKFQGRVTMTRDTSTSTVYMELSSLRSEDTAVYYCAREEYSSSSGYFDYWGQGTLVTVSSGGGGSGGGGSGGGGSGGGGSDIQMTQSPSSLSASVGDRVTITCRASQGISSWLAWYQQKPGKAPKLLIYAASSLQSGVPSRFSGSGSGTDFTLTISSLQPEDFATYYCQQSYSTPLTFGQGTKVEIK

SEQ ID NO: 239 - protein, 9 aa, Artificial Sequence
  synthetic sequence
YTFTSYGIS

SEQ ID NO: 240 - protein, 13 aa, Artificial Sequence
  synthetic sequence
GWMHPKSGDTGLT

SEQ ID NO: 241 - protein, 15 aa, Artificial Sequence [sequence omitted]

SEQ ID NO: 242 - protein, 11 aa, Artificial Sequence [sequence omitted]

SEQ ID NO: 243 - protein, 247 aa, Artificial Sequence
  synthetic sequence
QVQLVQSGAEVKKPGASVKVSCKASGYTFTSYGISWVRQAPGQGLEWMGWMHPKSGDTGLTQKFQGRVTMTRDTSTSTVYMELSSLRSEDTAVYYCARDTPYYYYGMDVWGQGTTVTVSSGGGGSGGGGSGGGGSGGGGSDIQMTQSPSSLSASVGDRVTITCRASQSISSWLAWYQQKPGKAPKLLIYAASSLQSGVPSRFSGSGSGTDFTLTISSLQPEDFATYYCQQSYSVPITFGQGTKVEIK

SEQ ID NO: 244 - protein, 9 aa, Artificial Sequence
  synthetic sequence
FTFGDYAMS

SEQ ID NO: 245 - protein, 13 aa, Artificial Sequence
  synthetic sequence
SYISGDIGYTNYA

SEQ ID NO: 246 - protein, 16 aa, Artificial Sequence
  synthetic sequence
CARDVAATGNWYFDLW

SEQ ID NO: 247 - protein, 248 aa, Artificial Sequence
  synthetic sequence
EVQLVESGGGLVKPGGSLRLSCAASGFTFGDYAMSWVRQAPGKGLEWVSYISGDIGYTNYAAPVKGRFTISRDDSKNTLYLQMNSLKTEDTAVYYCARDVAATGNWYFDLWGRGTLVTVSSGGGGSGGGGSGGGGSGGGGSDIQMTQSPSSLSASVGDRVTITCRASQSISSYLNWYQQKPGKAPKLLIYAASSLQSGVPSRFSGSGSGTDFTLTISSLQPEDFATYYCQQSYSTPLTFGGGTKVEIK

SEQ ID NO: 248 - protein, 9 aa, Artificial Sequence
  synthetic sequence
FSFSSYTMN

SEQ ID NO: 249 - protein, 13 aa, Artificial Sequence
  synthetic sequence
SFITSSSRTIYYA

SEQ ID NO: 250 - protein, 18 aa, Artificial Sequence
  synthetic sequence
CARDRRGDYGDSWYFDLW

SEQ ID NO: 251 - protein, 11 aa, Artificial Sequence
  synthetic sequence
RASQSVRNYLA

SEQ ID NO: 252 - protein, 7 aa, Artificial Sequence
  synthetic sequence
GASTRAT

SEQ ID NO: 253 - protein, 11 aa, Artificial Sequence [sequence omitted]

SEQ ID NO: 254 - protein, 250 aa, Artificial Sequence
  synthetic sequence
EVQLLESGGGLVQPGGSLRLSCAASGFSFSSYTMNWVRQAPGKGLEWVSFITSSSRTIYYADSVKGRFTISRDNSKNTLYLQMNSLRAEDTAVYYCARDRRGDYGDSWYFDLWGRGTLVTVSSGGGGSGGGGSGGGGSGGGGSEIVMTQSPATLSVSPGERATLSCRASQSVRNYLAWYQQKPGQAPRLLIYGASTRATGIPARFSGSGSGTEFTLTISSLQSEDFAVYYCQQYGSSPLTFGGGTKVEIK

SEQ ID NO: 255 - protein, 9 aa, Artificial Sequence
  synthetic sequence
YTFTGHYMH

SEQ ID NO: 256 - protein, 252 aa, Artificial Sequence
  synthetic sequence
QVQLVQSGAEVKKPGASVKVSCKASGYTFTGHYMHWVRQAPGQGLEWMGIINPSGGSTSYAQKFQGRVTMTRDTSTSTVYMELSSLRSEDTAVYYCARDTGYSYGRYYYYGMDVWGQGTTVTVSSGGGGSGGGGSGGGGSGGGGSDIQMTQSPSSLSASVGDRVTITCRASQSIGRWLAWYQQKPGKAPKLLIYDASNLQSGVPSRFSGSGSGTDFTLTISSLQPEDFATYYCQQSYSIPITFGGGTKVEIK

SEQ ID NO: 257 - protein, 9 aa, Artificial Sequence
  synthetic sequence
YTFSKHFVH

SEQ ID NO: 258 - protein, 13 aa, Artificial Sequence
  synthetic sequence
GWMNPNSGNSGYA

SEQ ID NO: 259 - protein, 16 aa, Artificial Sequence
  synthetic sequence
CARGEGGYYYYGMDVW

SEQ ID NO: 260 - protein, 248 aa, Artificial Sequence
  synthetic sequence
QVQLVQSGAEVKKPGASVKVSCKASGYTFSKHFVHWVRQAPGQGLEWMGWMNPNSGNSGYAQKFQGRVTMTRDTSTSTVYMELSSLRSEDTAVYYCARGEGGYYYYGMDVWGQGTLVTVSSGGGGSGGGGSGGGGSGGGGSDIQMTQSPSSLSASVGDRVTITCRASQSISSWLAWYQQKPGKAPKLLIYAASTLQSGVPSRFSGSGSGTDFTLTISSLQPEDFATYYCQQSYSTPWTFGQGTKVEIK

SEQ ID NO: 261 - protein, 9 aa, Artificial Sequence
  synthetic sequence
FTFGSYSMS

SEQ ID NO: 262 - protein, 12 aa, Artificial Sequence
  synthetic sequence
SAIGTGGGTYYA

SEQ ID NO: 263 - protein, 16 aa, Artificial Sequence
  synthetic sequence
CAKGTPYYYYYGMDVW

SEQ ID NO: 264 - protein, 11 aa, Artificial Sequence
  synthetic sequence
RASQPLSNWLA

SEQ ID NO: 265 - protein, 11 aa, Artificial Sequence [sequence omitted]

SEQ ID NO: 266 - protein, 247 aa, Artificial Sequence
  synthetic sequence
EVQLLESGGGLVQPGGSLRLSCAASGFTFGSYSMSWVRQAPGKGLEWVSAIGTGGGTYYADSVKGRFTISRDNSKNTLYLQMNSLRAEDTAVYYCAKGTPYYYYYGMDVWGQGTMVTVSSGGGGSGGGGSGGGGSGGGGSDIQMTQSPSSLSASVGDRVTITCRASQPLSNWLAWYQQKPGKAPKLLIYAASSLQSGVPSRFSGSGSGTDFTLTISSLQPEDFATYYCQQAISFPLTFGGGTKVEIK

SEQ ID NO: 267 - protein, 20 aa, Artificial Sequence
  synthetic sequence
CARDLGYYDSSGYFGAFDIW

SEQ ID NO: 268 - protein, 11 aa, Artificial Sequence
  synthetic sequence
QSSEDISSSLN

SEQ ID NO: 269 - protein, 7 aa, Artificial Sequence
  synthetic sequence
AASSLQI

SEQ ID NO: 270 - protein, 11 aa, Artificial Sequence [sequence omitted]

SEQ ID NO: 271 - protein, 252 aa, Artificial Sequence
  synthetic sequence
QVQLVQSGAEVKKPGASVKVSCKASGYTFTSYYMHWVRQAPGQGLEWMGWMNPNSGNTGYAQKFQGRVTMTRDTSTSTVYMELSSLRSEDTAVYYCARDLGYYDSSGYFGAFDIWGQGTTVTVSSGGGGSGGGGSGGGGSGGGGSDIQMTQSPSSLSASVGDRVTITCQSSEDISSSLNWYQQKPGKAPKLLIYAASSLQIGVPSRFSGSGSGTDFTLTISSLQPEDFATYYCQQTYSTPYTFGQGTKVEIK

SEQ ID NO: 272 - protein, 13 aa, Artificial Sequence
  synthetic sequence
GIINPRGGSTIFA

SEQ ID NO: 273 - protein, 17 aa, Artificial Sequence
  synthetic sequence
CARGTRSSGWYGWFDPW

SEQ ID NO: 274 - protein, 11 aa, Artificial Sequence
  synthetic sequence
RASQGIGNWLA

SEQ ID NO: 275 - protein, 7 aa, Artificial Sequence
  synthetic sequence
AASNLET

SEQ ID NO: 276 - protein, 11 aa, Artificial Sequence
  synthetic sequence
CQQIHSYPLTF

SEQ ID NO: 277 - protein, 249 aa, Artificial Sequence
  synthetic sequence
QVQLVQSGAEVKKPGASVKVSCKASGYTFTSYGISWVRQAPGQGLEWMGIINPRGGSTIFAQKFQGRVTMTRDTSTSTVYMELSSLRSEDTAVYYCARGTRSSGWYGWFDPWGQGTLVTVSSGGGGSGGGGSGGGGSGGGGSDIQMTQSPSSLSASVGDRVTITCRASQGIGNWLAWYQQKPGKAPKLLIYAASNLETGVPSRFSGSGSGTDFTLTISSLQPEDFATYYCQQIHSYPLTFGGGTKVEIK

SEQ ID NO: 278 - protein, 9 aa, Artificial Sequence
  synthetic sequence
FTFDDYGMS

SEQ ID NO: 279 - protein, 13 aa, Artificial Sequence
  synthetic sequence
SYISSSSSYIYYA

SEQ ID NO: 280 - protein, 16 aa, Artificial Sequence
  synthetic sequence
CAREIAAAGFYGMDVW

SEQ ID NO: 281 - protein, 248 aa, Artificial Sequence
  synthetic sequence
EVQLLESGGGLVQPGGSLRLSCAASGFTFDDYGMSWVRQAPGKGLEWVSYISSSSSYIYYADSVKGRFTISRDNSKNTLYLQMNSLRAEDTAVYYCAREIAAAGFYGMDVWGQGTTVTVSSGGGGSGGGGSGGGGSGGGGSDIQMTQSPSSLSASVGDRVTITCRASQSISSYLNWYQQKPGKAPKLLIYAASSLQSGVPSRFSGSGSGTDFTLTISSLQPEDFATYYCQQSYSTPLTFGGGTKVEIK

SEQ ID NO: 282 - protein, 9 aa, Artificial Sequence
  synthetic sequence
GTLSRYGVS

SEQ ID NO: 283 - protein, 13 aa, Artificial Sequence
  synthetic sequence
GGIIPIFGTTNYA

SEQ ID NO: 284 - protein, 21 aa, Artificial Sequence
  synthetic sequence
CARDRVYYDSSGYPTWYFDLW

SEQ ID NO: 285 - protein, 12 aa, Artificial Sequence
  synthetic sequence
RASQSVSSSYLA

SEQ ID NO: 286 - protein, 11 aa, Artificial Sequence [sequence omitted]

SEQ ID NO: 287 - protein, 254 aa, Artificial Sequence
  synthetic sequence
QVQLVQSGAEVKKPGSSVKVSCKASGGTLSRYGVSWVRQAPGQGLEWMGGIIPIFGTTNYAQKFQGRVTITADESTSTAYMELSSLRSEDTAVYYCARDRVYYDSSGYPTWYFDLWGRGTLVTVSSGGGGSGGGGSGGGGSGGGGSEIVMTQSPATLSVSPGERATLSCRASQSVSSSYLAWYQQKPGQAPRLLIYGASTRATGIPARFSGSGSGTEFTLTISSLQSEDFAVYYCQQYGSSPITFGQGTKVEIK

SEQ ID NO: 288 - protein, 9 aa, Artificial Sequence
  synthetic sequence
FTFDDFAMH

SEQ ID NO: 289 - protein, 13 aa, Artificial Sequence
  synthetic sequence
SGISGNGDSRYYA

SEQ ID NO: 290 - protein, 16 aa, Artificial Sequence
  synthetic sequence
CARDASYGGNYGMDVW

SEQ ID NO: 291 - protein, 11 aa, Artificial Sequence
  synthetic sequence
QASQDIRNYLN

SEQ ID NO: 292 - protein, 248 aa, Artificial Sequence
  synthetic sequence
EVQLLESGGGLVQPGGSLRLSCAASGFTFDDFAMHWVRQAPGKGLEWVSGISGNGDSRYYADSVKGRFTISRDNSKNTLYLQMNSLRAEDTAVYYCARDASYGGNYGMDVWGQGTTVTVSSGGGGSGGGGSGGGGSGGGGSDIQMTQSPSSLSASVGDRVTITCQASQDIRNYLNWYQQKPGKAPKLLIYKASTLESGVPSRFSGSGSGTDFTLTISSLQPEDFATYYCQQANSFPLTFGPGTKVDIK

SEQ ID NO: 293 - protein, 15 aa, Artificial Sequence
  synthetic sequence
CAREWLVPYYGMDVW

SEQ ID NO: 294 - protein, 11 aa, Artificial Sequence
  synthetic sequence
RASQSISRWLA

SEQ ID NO: 295 - protein, 7 aa, Artificial Sequence
  synthetic sequence
GASNLQS

SEQ ID NO: 296 - protein, 246 aa, Artificial Sequence
  synthetic sequence
EVQLVESGGGLVKPGGSLRLSCAASGFTFSSYWMSWVRQAPGKGLEWVSAIGTGGGTYYAAPVKGRFTISRDDSKNTLYLQMNSLKTEDTAVYYCAREWLVPYYGMDVWGQGTTVTVSSGGGGSGGGGSGGGGSGGGGSDIQMTQSPSSLSASVGDRVTITCRASQSISRWLAWYQQKPGKAPKLLIYGASNLQSGVPSRFSGSGSGTDFTLTISSLQPEDFATYYCQQSYSTPWTFGQGTKVEIK

SEQ ID NO: 297 - protein, 9 aa, Artificial Sequence
  synthetic sequence
FSVSSNYMS

SEQ ID NO: 298 - protein, 13 aa, Artificial Sequence
  synthetic sequence
AGISYDGSSKPYA

SEQ ID NO: 299 - protein, 15 aa, Artificial Sequence
  synthetic sequence
CARSRGIAARPLQHW

SEQ ID NO: 300 - protein, 17 aa, Artificial Sequence
  synthetic sequence
KSSQSVLYSSNNKNYLA

SEQ ID NO: 301 - protein, 7 aa, Artificial Sequence
  synthetic sequence
WASTRQS

SEQ ID NO: 302 - protein, 11 aa, Artificial Sequence
  synthetic sequence
CHQYYGHPPTF

SEQ ID NO: 303 - protein, 253 aa, Artificial Sequence
  synthetic sequence
EVQLLESGGGLVQPGGSLRLSCAASGFSVSSNYMSWVRQAPGKGLEWVAGISYDGSSKPYADSVKGRFTISRDNSKNTLYLQMNSLRAEDTAVYYCARSRGIAARPLQHWGQGTLVTVSSGGGGSGGGGSGGGGSGGGGSDIVMTQSPDSLAVSLGERATINCKSSQSVLYSSNNKNYLAWYQQKPGQPPKLLIYWASTRQSGVPDRFSGSGSGTDFTLTISSLQAEDVAVYYCHQYYGHPPTFGGGTKVEIK

SEQ ID NO: 304 - protein, 7 aa, Artificial Sequence
  synthetic sequence
QASTRQS

SEQ ID NO: 305 - protein, 253 aa, Artificial Sequence
  synthetic sequence
EVQLLESGGGLVQPGGSLRLSCAASGFSVSSNYMSWVRQAPGKGLEWVAGISYDGSSKPYADSVKGRFTISRDNSKNTLYLQMNSLRAEDTAVYYCARSRGIAARPLQHWGQGTLVTVSSGGGGSGGGGSGGGGSGGGGSDIVMTQSPDSLAVSLGERATINCKSSQSVLYSSNNKNYLAWYQQKPGQPPKLLIYQASTRQSGVPDRFSGSGSGTDFTLTISSLQAEDVAVYYCHQYYGHPPTFGGGTKVEIK

SEQ ID NO: 306 - protein, 9 aa, Artificial Sequence
  synthetic sequence
FSFSDYGMH

SEQ ID NO: 307 - protein, 16 aa, Artificial Sequence
  synthetic sequence
CARDGGWQPAAILDYW

SEQ ID NO: 308 - protein, 248 aa, Artificial Sequence
  synthetic sequence
EVQLLESGGGLVQPGGSLRLSCAASGFSFSDYGMHWVRQAPGKGLEWVSAISGSGGSTYYADSVKGRFTISRDNSKNTLYLQMNSLRAEDTAVYYCARDGGWQPAAILDYWGQGTLVTVSSGGGGSGGGGSGGGGSGGGGSDIQMTQSPSSLSASVGDRVTITCRASQGISNNLNWYQQKPGKAPKLLIYDASNLETGVPSRFSGSGSGTDFTLTISSLQPEDFATYYCQQSYSTPLTFGGGTKVEIK

SEQ ID NO: 309 - protein, 9 aa, Artificial Sequence
  synthetic sequence
FTFSDHGMH

SEQ ID NO: 310 - protein, 12 aa, Artificial Sequence
  synthetic sequence
SVIYGGESTYYA

SEQ ID NO: 311 - protein, 16 aa, Artificial Sequence
  synthetic sequence
CARDPAVAGGGIFDYW

SEQ ID NO: 312 - protein, 11 aa, Artificial Sequence
  synthetic sequence
CQQSYSTCYTF

SEQ ID NO: 313 - protein, 247 aa, Artificial Sequence
  synthetic sequence
EVQLLESGGGLVQPGGSLRLSCAASGFTFSDHGMHWVRQAPGKGLEWVSVIYGGESTYYADSVKGRFTISRDNSKNTLYLQMNSLRAEDTAVYYCARDPAVAGGGIFDYWGQGTLVTVSSGGGGSGGGGSGGGGSGGGGSDIQMTQSPSSLSASVGDRVTITCRASQGISNYLAWYQQKPGKAPKLLIYDASNLETGVPSRFSGSGSGTDFTLTISSLQPEDFATYYCQQSYSTCYTFGQGTKLEIK

SEQ ID NO: 314 - protein, 9 aa, Artificial Sequence
  synthetic sequence
DTFTGYYIH

SEQ ID NO: 315 - protein, 13 aa, Artificial Sequence
  synthetic sequence
GWINPNSGGTNYA

SEQ ID NO: 316 - protein, 17 aa, Artificial Sequence
  synthetic sequence
CARSGLWLGSYYGMDVW

SEQ ID NO: 317 - protein, 11 aa, Artificial Sequence
  synthetic sequence
RASQTISIWLA

SEQ ID NO: 318 - protein, 7 aa, Artificial Sequence
  synthetic sequence
DASTLQS

SEQ ID NO: 319 - protein, 11 aa, Artificial Sequence [sequence omitted]

SEQ ID NO: 320 - protein, 249 aa, Artificial Sequence
  synthetic sequence
QVQLVQSGAEVKKPGASVKVSCKASGDTFTGYYIHWVRQAPGQGLEWMGWINPNSGGTNYAQKFQGRVTMTRDTSTSTVYMELSSLRSEDTAVYYCARSGLWLGSYYGMDVWGQGTLVTVSSGGGGSGGGGSGGGGSGGGGSDIQMTQSPSSLSASVGDRVTITCRASQTISIWLAWYQQKPGKAPKLLIYDASTLQSGVPSRFSGSGSGTDFTLTISSLQPEDFATYYCQQYSSYPLTFGQGTKVEIK

SEQ ID NO: 321 - protein, 9 aa, Artificial Sequence
  synthetic sequence
YTFTSYDIN

SEQ ID NO: 322 - protein, 13 aa, Artificial Sequence
  synthetic sequence
GWINPNSGTTGYA

SEQ ID NO: 323 - protein, 14 aa, Artificial Sequence
  synthetic sequence
CARSPYYYYGMDVW

SEQ ID NO: 324 - protein, 11 aa, Artificial Sequence
  synthetic sequence
RASHFISRWVA

SEQ ID NO: 325 - protein, 10 aa, Artificial Sequence
  synthetic sequence
CQQSYSGISF

SEQ ID NO: 326 - protein, 245 aa, Artificial Sequence
  synthetic sequence
QVQLVQSGAEVKKPGASVKVSCKASGYTFTSYDINWVRQAPGQGLEWMGWINPNSGTTGYAQKFQGRVTMTRDTSTSTVYMELSSLRSEDTAVYYCARSPYYYYGMDVWGQGTTVTVSSGGGGSGGGGSGGGGSGGGGSDIQMTQSPSSLSASVGDRVTITCRASHFISRWVAWYQQKPGKAPKLLIYAASTLQSGVPSRFSGSGSGTDFTLTISSLQPEDFATYYCQQSYSGISFGPGTKVDIK

SEQ ID NO: 327 - protein, 9 aa, Artificial Sequence
  synthetic sequence
FTFNNYGMN

SEQ ID NO: 328 - protein, 13 aa, Artificial Sequence
  synthetic sequence
SRINSDGSSTSYA

SEQ ID NO: 329 - protein, 14 aa, Artificial Sequence [sequence omitted]

SEQ ID NO: 330 - protein, 12 aa, Artificial Sequence
  synthetic sequence
RASQSVSGSYLA

SEQ ID NO: 331 - protein, 7 aa, Artificial Sequence
  synthetic sequence
ATSSRAS

SEQ ID NO: 332 - protein, 10 aa, Artificial Sequence
  synthetic sequence
CQQYYSGLTF

SEQ ID NO: 333 - protein, 246 aa, Artificial Sequence
  synthetic sequence
EVQLLESGGGLVQPGGSLRLSCAASGFTFNNYGMNWVRQAPGKGLEWVSRINSDGSSTSYADSVKGRFTISRDNSKNTLYLQMNSLRAEDTAVYYCARGAYYYYYMDVWGQGTLVTVSSGGGGSGGGGSGGGGSGGGGSEIVMTQSPATLSVSPGERATLSCRASQSVSGSYLAWYQQKPGQAPRLLIYATSSRASGIPARFSGSGSGTEFTLTISSLQSEDFAVYYCQQYYSGLTFGQGTKVEIK

SEQ ID NO: 334 - protein, 9 aa, Artificial Sequence
  synthetic sequence
FTFSNSDMN

SEQ ID NO: 335 - protein, 13 aa, Artificial Sequence
  synthetic sequence
AHIWNDGSQKYYA

SEQ ID NO: 336 - protein, 17 aa, Artificial Sequence
  synthetic sequence
CARDRTDPGYSSAMDVW

SEQ ID NO: 337 - protein, 11 aa, Artificial Sequence
  synthetic sequence
RASQDIRNYLG

SEQ ID NO: 338 - protein, 7 aa, Artificial Sequence
  synthetic sequence
DASSLET

SEQ ID NO: 339 - protein, 11 aa, Artificial Sequence
  synthetic sequence
CQQATSLPLTF

SEQ ID NO: 340 - protein, 249 aa, Artificial Sequence
  synthetic sequence
EVQLLESGGGLVQPGGSLRLSCAASGFTFSNSDMNWVRQAPGKGLEWVAHIWNDGSQKYYADSVKGRFTISRDNSKNTLYLQMNSLRAEDTAVYYCARDRTDPGYSSAMDVWGQGTTVTVSSGGGGSGGGGSGGGGSGGGGSDIQMTQSPSSLSASVGDRVTITCRASQDIRNYLGWYQQKPGKAPKLLIYDASSLETGVPSRFSGSGSGTDFTLTISSLQPEDFATYYCQQATSLPLTFGGGTKVEIK

SEQ ID NO: 341 - protein, 15 aa, Artificial Sequence
  synthetic sequence
CAKDSDYSNLLWDYW

SEQ ID NO: 342 - protein, 11 aa, Artificial Sequence
  synthetic sequence
RASQDITNDLG

SEQ ID NO: 343 - protein, 7 aa, Artificial Sequence
  synthetic sequence
QASSLES

SEQ ID NO: 344 - protein, 11 aa, Artificial Sequence [sequence omitted]

SEQ ID NO: 345 - protein, 247 aa, Artificial Sequence
  synthetic sequence
QVQLVQSGAEVKKPGASVKVSCKASGYTFTSYDINWVRQAPGQGLEWMGWMNPNSGNTGYAQKFQGRVTMTRDTSTSTVYMELSSLRSEDTAVYYCAKDSDYSNLLWDYWGQGTLVTVSSGGGGSGGGGSGGGGSGGGGSDIQMTQSPSSLSASVGDRVTITCRASQDITNDLGWYQQKPGKAPKLLIYQASSLESGVPSRFSGSGSGTDFTLTISSLQPEDFATYYCQQSYTIPLTFGQGTKVEIK

SEQ ID NO: 346 - protein, 13 aa, Artificial Sequence
  synthetic sequence
AVVSYDGTNKYYA

SEQ ID NO: 347 - protein, 16 aa, Artificial Sequence
  synthetic sequence
CAKDICSSTSCYFDLW

SEQ ID NO: 348 - protein, 11 aa, Artificial Sequence
  synthetic sequence
RASQNINNYVN

SEQ ID NO: 349 - protein, 11 aa, Artificial Sequence [sequence omitted]

SEQ ID NO: 350 - protein, 248 aa, Artificial Sequence
  synthetic sequence
EVQLLESGGGLVQPGGSLRLSCAASGFTFGDYAMSWVRQAPGKGLEWVAVVSYDGTNKYYADSVKGRFTISRDNSKNTLYLQMNSLRAEDTAVYYCAKDICSSTSCYFDLWGRGTLVTVSSGGGGSGGGGSGGGGSGGGGSDIQMTQSPSSLSASVGDRVTITCRASQNINNYVNWYQQKPGKAPKLLIYDASNLETGVPSRFSGSGSGTDFTLTISSLQPEDFATYYCQQANSFPPTFGQGTRLEIK

SEQ ID NO: 351 - protein, 13 aa, Artificial Sequence
  synthetic sequence
GIIDPSGGSTSYA

SEQ ID NO: 352 - protein, 17 aa, Artificial Sequence
  synthetic sequence
CAREEWSSGGVGYFDYW

SEQ ID NO: 353 - protein, 11 aa, Artificial Sequence
  synthetic sequence
RASQGISSYLA

SEQ ID NO: 354 - protein, 7 aa, Artificial Sequence
  synthetic sequence
ATSSLQT

SEQ ID NO: 355 - protein, 11 aa, Artificial Sequence [sequence omitted]

SEQ ID NO: 356 - protein, 249 aa, Artificial Sequence
  synthetic sequence
QVQLVQSGAEVKKPGASVKVSCKASGYTFTSYYMHWVRQAPGQGLEWMGIIDPSGGSTSYAQKFQGRVTMTRDTSTSTVYMELSSLRSEDTAVYYCAREEWSSGGVGYFDYWGQGTLVTVSSGGGGSGGGGSGGGGSGGGGSDIQMTQSPSSLSASVGDRVTITCRASQGISSYLAWYQQKPGKAPKLLIYATSSLQTGVPSRFSGSGSGTDFTLTISSLQPEDFATYYCQQTYSIPITFGQGTRLEIK

SEQ ID NO: 357 - protein, 13 aa, Artificial Sequence
  synthetic sequence
SAISGGGEDTYYA

SEQ ID NO: 358 - protein, 7 aa, Artificial Sequence
  synthetic sequence
KASSLES

SEQ ID NO: 359 - protein, 11 aa, Artificial Sequence
  synthetic sequence
CQQANSYPVTF

SEQ ID NO: 360 - protein, 248 aa, Artificial Sequence
  synthetic sequence
EVQLLESGGGLVQPGGSLRLSCAASGFTFDDYAMHWVRQAPGKGLEWVSAISGGGEDTYYADSVKGRFTISRDNSKNTLYLQMNSLRAEDTAVYYCARDASYGGNYGMDVWGQGTTVTVSSGGGGSGGGGSGGGGSGGGGSDIQMTQSPSSLSASVGDRVTITCQASQDIRNYLNWYQQKPGKAPKLLIYKASSLESGVPSRFSGSGSGTDFTLTISSLQPEDFATYYCQQANSYPVTFGGGTKVEIK

SEQ ID NO: 361 - protein, 19 aa, Artificial Sequence
  synthetic sequence
CARDSVAGTGGRYYGMDVW

SEQ ID NO: 362 - protein, 11 aa, Artificial Sequence
  synthetic sequence
RASQGISNYFA

SEQ ID NO: 363 - protein, 7 aa, Artificial Sequence
  synthetic sequence
AASSLQG

SEQ ID NO: 364 - protein, 11 aa, Artificial Sequence [sequence omitted]

SEQ ID NO: 365 - protein, 251 aa, Artificial Sequence
  synthetic sequence
QVQLVQSGAEVKKPGASVKVSCKASGYTFTSYYMHWVRQAPGQGLEWMGIINPSGGSTSYAQKFQGRVTMTRDTSTSTVYMELSSLRSEDTAVYYCARDSVAGTGGRYYGMDVWGQGTLVTVSSGGGGSGGGGSGGGGSGGGGSDIQMTQSPSSLSASVGDRVTITCRASQGISNYFAWYQQKPGKAPKLLIYAASSLQGGVPSRFSGSGSGTDFTLTISSLQPEDFATYYCQQSYSLPYTFGQGTKLEIK

SEQ ID NO: 366 - protein, 13 aa, Artificial Sequence
  synthetic sequence
GIINPSGGNTKYA

SEQ ID NO: 367 - protein, 13 aa, Artificial Sequence
  synthetic sequence
CTTADYYYYMDVW

SEQ ID NO: 368 - protein, 10 aa, Artificial Sequence
  synthetic sequence
CQQYYSNADF

SEQ ID NO: 369 - protein, 244 aa, Artificial Sequence
  synthetic sequence
QVQLVQSGAEVKKPGASVKVSCKASGYTFTGYYMHWVRQAPGQGLEWMGIINPSGGNTKYAQKFQGRVTMTRDTSTSTVYMELSSLRSEDTAVYYCTTADYYYYMDVWGKGTTVTVSSGGGGSGGGGSGGGGSGGGGSDIQMTQSPSSLSASVGDRVTITCRASQGISNYLAWYQQKPGKAPKLLIYAASSLQSGVPSRFSGSGSGTDFTLTISSLQPEDFATYYCQQYYSNADFGQGTKVEIK

SEQ ID NO: 370 - protein, 9 aa, Artificial Sequence
  synthetic sequence
FTFSDFWMH

SEQ ID NO: 371 - protein, 14 aa, Artificial Sequence [sequence omitted]

SEQ ID NO: 372 - protein, 11 aa, Artificial Sequence
  synthetic sequence
RASQSVSRSLA

SEQ ID NO: 373 - protein, 5 aa, Artificial Sequence
  synthetic sequence
SSLQS

SEQ ID NO: 374 - protein, 9 aa, Artificial Sequence
  synthetic sequence
QQYKSYPVT

SEQ ID NO: 375 - protein, 246 aa, Artificial Sequence
  synthetic sequence
EVQLLESGGGLVQPGGSLRLSCAASGFTFSDFWMHWVRQAPGKGLEWISYISGDSGYTNYADSVKGRFTISRDNSKNTLYLQMNSLRAEDTAVYYCARDRPYYYYMDVWGKGTTVTVSSGGGGSGGGGSGGGGSGGGGSDIQMTQSPSSLSASVGDRVTITCRASQSVSRSLAWYQQKPGKAPKLLIYAASSLQSGVPSRFSGSGSGTDFTLTISSLQPEDFATYYCQQYKSYPVTFGQGTKVEIK

SEQ ID NO: 376 - protein, 9 aa, Artificial Sequence
  synthetic sequence
FTFDDYTMH

SEQ ID NO: 377 - protein, 13 aa, Artificial Sequence
  synthetic sequence
SDISGSGGSTYYA

SEQ ID NO: 378 - protein, 17 aa, Artificial Sequence
  synthetic sequence
CAKDVVVAGTPLHFDYW

SEQ ID NO: 379 - protein, 5 aa, Artificial Sequence
  synthetic sequence
SYLQS

SEQ ID NO: 380 - protein, 9 aa, Artificial Sequence
  synthetic sequence
QQAHNYPIT

SEQ ID NO: 381 - protein, 249 aa, Artificial Sequence
  synthetic sequence
EVQLLESGGGLVQPGGSLRLSCAASGFTFDDYTMHWVRQAPGKGLEWVSDISGSGGSTYYADSVKGRFTISRDNSKNTLYLQMNSLRAEDTAVYYCAKDVVVAGTPLHFDYWGQGTLVTVSSGGGGSGGGGSGGGGSGGGGSDIQMTQSPSSLSASVGDRVTITCQASQDISNYLNWYQQKPGKAPKLLIYAASYLQSGVPSRFSGSGSGTDFTLTISSLQPEDFATYYCQQAHNYPITFGQGTRLEIK

SEQ ID NO: 382 - protein, 13 aa, Artificial Sequence
  synthetic sequence
ASISSTSAYIDYA

SEQ ID NO: 383 - protein, 14 aa, Artificial Sequence
  synthetic sequence
CAREVVGATTFDYW

SEQ ID NO: 384 - protein, 11 aa, Artificial Sequence
  synthetic sequence
RASQSISTWLA

SEQ ID NO: 385 - protein, 9 aa, Artificial Sequence
  synthetic sequence
QQANAFPPT

SEQ ID NO: 386 - protein, 246 aa, Artificial Sequence
  synthetic sequence
EVQLLESGGGLVQPGGSLRLSCAASEFTFSNAWMSWVRQAPGKGLEWVASISSTSAYIDYADSVKGRFTISRDNSKNTLYLQMNSLRAEDTAVYYCAREVVGATTFDYWGQGTLVTVSSGGGGSGGGGSGGGGSGGGGSDIQMTQSPSSLSASVGDRVTITCRASQSISTWLAWYQQKPGKAPKLLIYAASSLQSGVPSRFSGSGSGTDFTLTISSLQPEDFATYYCQQANAFPPTFGQGTRLEIK

SEQ ID NO: 387 - protein, 13 aa, Artificial Sequence
  synthetic sequence
GWMEPHTGNTRYA

SEQ ID NO: 388 - protein, 12 aa, Artificial Sequence
  synthetic sequence
CAKGGFSWFDPW

SEQ ID NO: 389 - protein, 5 aa, Artificial Sequence
  synthetic sequence
STRES

SEQ ID NO: 390 - protein, 9 aa, Artificial Sequence
  synthetic sequence
QQYYSTPPT

SEQ ID NO: 391 - protein, 250 aa, Artificial Sequence
  synthetic sequence
QVQLVQSGAEVKKPGSSVKVSCKASGGTFSSYAISWVRQAPGQGLEWMGWMEPHTGNTRYAQKFQGRVTITADESTSTAYMELSSLRSEDTAVYYCAKGGFSWFDPWGQGTLVTVSSGGGGSGGGGSGGGGSGGGGSDIVMTQSPDSLAVSLGERATINCKSSQSVLYSSNNKNYLAWYQQKPGQPPKLLIYWASTRESGVPDRFSGSGSGTDFTLTISSLQAEDVAVYYCQQYYSTPPTFGQGTRLEIK

SEQ ID NO: 392 - protein, 13 aa, Artificial Sequence
  synthetic sequence
ASITSSSAFIDYA

SEQ ID NO: 393 - protein, 15 aa, Artificial Sequence
  synthetic sequence
CARERVDWNSYFDLW

SEQ ID NO: 394 - protein, 12 aa, Artificial Sequence
  synthetic sequence
RASQGISNSYLA

SEQ ID NO: 395 - protein, 5 aa, Artificial Sequence
  synthetic sequence
STRAT

SEQ ID NO: 396 - protein, 9 aa, Artificial Sequence
  synthetic sequence
QQYYTYPPT

SEQ ID NO: 397 - protein, 248 aa, Artificial Sequence
  synthetic sequence
EVQLLESGGGLVKPGGSLRLSCAASGFTFDDYAMHWVRQAPGKGLEWVASITSSSAFIDYAASVKGRFTISRDDSKNTLYLQMNSLKTEDTAVYYCARERVDWNSYFDLWGRGTLVTVSSGGGGSGGGGSGGGGSGGGGSEIVMTQSPATLSVSPGERATLSCRASQGISNSYLAWYQQKPGQAPRLLIYGASTRATGIPARFSGSGSGTEFTLTISSLQSEDFAVYYCQQYYTYPPTFGPGTKVDIK

SEQ ID NO: 398 - protein, 9 aa, Artificial Sequence
  synthetic sequence
FAFSSHWMH

SEQ ID NO: 399 - protein, 13 aa, Artificial Sequence
  synthetic sequence
AGTSGSGESRDYA

SEQ ID NO: 400 - protein, 14 aa, Artificial Sequence
  synthetic sequence
CARETYYYYYMDVW

SEQ ID NO: 401 - protein, 5 aa, Artificial Sequence
  synthetic sequence
ANLEG

SEQ ID NO: 402 - protein, 9 aa, Artificial Sequence
  synthetic sequence
QQSDIFPPT

SEQ ID NO: 403 - protein, 246 aa, Artificial Sequence
  synthetic sequence
EVQLLESGGGLVKPGGSLRLSCAASGFAFSSHWMHWVRQAPGKGLEWVAGTSGSGESRDYADFVKGRFTISRDDSKNTLYLQMNSLKTEDTAVYYCARETYYYYYMDVWGKGTTVTVSSGGGGSGGGGSGGGGSGGGGSDIQMTQSPSSLSASVGDRVTITCRASQGISNYLAWYQQKPGKAPKLLIYDAANLEGGVPSRFSGSGSGTDFTLTISSLQPEDFATYYCQQSDIFPPTFGQGTKVEIK

SEQ ID NO: 404 - protein, 9 aa, Artificial Sequence
  synthetic sequence
YTFTRHWIH

SEQ ID NO: 405 - protein, 13 aa, Artificial Sequence
  synthetic sequence
GWINVKTGGAGYA

SEQ ID NO: 406 - protein, 14 aa, Artificial Sequence
  synthetic sequence
CARESSGWYGTDVW

SEQ ID NO: 407 - protein, 11 aa, Artificial Sequence
  synthetic sequence
RASQSISNYLA

SEQ ID NO: 408 - protein, 9 aa, Artificial Sequence
  synthetic sequence
QQSNSFPLT

SEQ ID NO: 409 - protein, 246 aa, Artificial Sequence
  synthetic sequence
QVQLVQSGAEVKKPGASVKVSCKASGYTFTRHWIHWVRQAPGQGLEWMGWINVKTGGAGYAQKFQGRVTMTRDTSTSTVYMELSSLRSEDTAVYYCARESSGWYGTDVWGQGTTVTVSSGGGGSGGGGSGGGGSGGGGSDIQMTQSPSSLSASVGDRATITCRASQSISNYLAWYQQKPGKAPKLLIYAASSLQSGVPSRFSGSGSGTDFTLTISSLQPEDFATYYCQQSNSFPLTFGGGTKVEIK

SEQ ID NO: 410 - protein, 13 aa, Artificial Sequence
  synthetic sequence
AAISYDGKYKDYE

SEQ ID NO: 411 - protein, 15 aa, Artificial Sequence
  synthetic sequence
CARENKQWLASFDYW

SEQ ID NO: 412 - protein, 11 aa, Artificial Sequence
  synthetic sequence
QASQDISNFVN

SEQ ID NO: 413 - protein, 4 aa, Artificial Sequence
  synthetic sequence
NLRS

SEQ ID NO: 414 - protein, 9 aa, Artificial Sequence
  synthetic sequence
QQANSFPVT

SEQ ID NO: 415 - protein, 246 aa, Artificial Sequence
  synthetic sequence
EVQLLESGGGLVQPGGSLRLSCAASGFTFSSYWMHWVRQAPGKGLEWVAAISYDGKYKDYEDSVKGRFTISRDNSKNTLYLQMNSLRAEDTAVYYCARENKQWLASFDYWGQGTLVTVSSGGGGSGGGGSGGGGSGGGGSDIQMTQSPSSLSASVGDRVTITCQASQDISNFVNWYQQKPGKAPKLLIYAANLRSGVPSRFSGSGSGTDFTLTISSLQPEDFATYYCQQANSFPVTFGPGTKVDIK

SEQ ID NO: 416 - protein, 120 aa, Artificial Sequence
  synthetic sequence
EVQLLESGGGLVQPGGSLRLSCAASGFTFSSYGMHWVRQAPGKGLEWVAVISDDGSDKYYADSVKGRFTISRDNSKNTLYLQMNSLRAEDTAVYYCTTSKYYYYYGMDVWGQGTTVTVSS

SEQ ID NO: 417 - protein, 107 aa, Artificial Sequence
  synthetic sequence
DIQMTQSPSSLSASVGDRVTITCQASQDISKSLNWYQQKPGKAPKLLIYAASSLQSGVPSRFSGSGSGTDFTLTISSLQPEDFATYYCQQGYSTPLTFGGGTKVEIK

SEQ ID NO: 418 - protein, 119 aa, Artificial Sequence
  synthetic sequence
QVQLVQSGAEVKKPGASVKVSCKASGYPFIGYYLHWVRQAPGQGLEWMGIINPSGGSTSYAQKFQGRVTMTRDTSTSTVYMELSSLRSEDTAVYYCAREGRLSYGMDAWGQGTLVTVSS

SEQ ID NO: 419 - protein, 107 aa, Artificial Sequence
  synthetic sequence
DIQMTQSPSSLSASVGDRVTITCRASQSISSYLAWYQQKPGKAPKLLIYGASTLESGVPSRFSGSGSGTDFTLTISSLQPEDFATYYCQQTWGPPFTFGQGTKLEIK

SEQ ID NO: 420 - protein, 119 aa, Artificial Sequence
  synthetic sequence
QVQLVQSGAEVKKPGASVKVSCKASGYPFIGQYLHWVRQAPGQGLEWMGIINPSGGSTSYAQKFQGRVTMTRDTSTSTVYMELSSLRSEDTAVYYCAREGRLSYGMDAWGQGTLVTVSS

SEQ ID NO: 421 - protein, 121 aa, Artificial Sequence
  synthetic sequence
QVQLVQSGAEVKKPGASVKVSCKASGGTFSSYAISWVRQAPGQGLEWMGSINPSGDTTSYAQKFQGRVTMTRDTSTSTVYMELSSLRSEDTAVYYCAKDKAQWLVGYFDYWGQGTLVTVSS

SEQ ID NO: 422 - protein, 107 aa, Artificial Sequence
  synthetic sequence
DIQMTQSPSSLSASVGDRVTITCQASQDISNSLNWYQQKPGKAPKLLIYAASSLQSGVPSRFSGSGSGTDFTLTISSLQPEDFATYYCQQSYSSVITFGQGTKVEIK

SEQ ID NO: 423 - protein, 118 aa, Artificial Sequence
  synthetic sequence
EVQLLESGGGLVQPGGSLRLSCAASGFTFSSYWMHWVRQAPGKGLEWVSSISPGGSNIDYADSVKGRFTISRDNSKNTLYLQMNSLRAEDTAVYYCAREVQLSHYDYWGQGTLVTVSS

SEQ ID NO: 424 - protein, 107 aa, Artificial Sequence
  synthetic sequence
DIQMTQSPSSLSASVGDRVTITCRASQGISNSLAWYQQKPGKAPKLLIYGASSLQSGVPSRFSGSGSGTDFTLTISSLQPEDFATYYCQQANSFPFTFGQGTKVEIK

SEQ ID NO: 425 - protein, 121 aa, Artificial Sequence
  synthetic sequence
EVQLLESGGGLVQPGGSLRLSCAASGFTFNNYAFHWVRQAPGKGLEWVSRINSYGTSTTYADSVKGRFTISRDNSKNTLYLQMNSLRAEDTAVYYCAREGPVAGYWYFDLWGQGTLVTVSS

SEQ ID NO: 426 - protein, 107 aa, Artificial Sequence
  synthetic sequence
DIQMTQSPSSLSASVGDRVTITCRASQIIGTNLAWYQQKPGKAPKLLIYGASSLQSGVPSRFSGSGSGTDFTLTISSLQPEDFATYYCQQSYRLPFTFGQGTKVEIK

SEQ ID NO: 427 - protein, 9 aa, Artificial Sequence
  synthetic sequence
FTFSDYQMS

SEQ ID NO: 428 - protein, 14 aa, Artificial Sequence
  synthetic sequence
AIISHADGGFKDYA

SEQ ID NO: 429 - protein, 18 aa, Artificial Sequence
  synthetic sequence
CAKPYSSGWSAVYYFDYW

SEQ ID NO: 430 - protein, 11 aa, Artificial Sequence
  synthetic sequence
RASRGITNDLG

SEQ ID NO: 431 - protein, 5 aa, Artificial Sequence
  synthetic sequence
STLQS

SEQ ID NO: 432 - protein, 9 aa, Artificial Sequence
  synthetic sequence
QQAYSFPWT

SEQ ID NO: 433 - protein, 124 aa, Artificial Sequence
  synthetic sequence
EVQLLESGGGLVQPGGSLRLSCAASGFTFSDYQMSWVRQAPGKGLEWVAIISHADGGFKDYADSVKGRFTISRDNSKNTLYLQMNSLRAEDTAVYYCAKPYSSGWSAVYYFDYWGQGTLVTVSS

SEQ ID NO: 434 - protein, 107 aa, Artificial Sequence
  synthetic sequence
DIQMTQSPSSLSASVGDRVTITCRASRGITNDLGWYQQKPGKAPKLLIYAASTLQSGVPSRFSGSGSGTDFTLTISSLQPEDFATYYCQQAYSFPWTFGQGTKVEIK

SEQ ID NO: 435 - protein, 121 aa, Artificial Sequence
  synthetic sequence
QVQLVQSGAEVKKPGASVKVSCKASGYTFTGYHIHWVRQAPGQGLEWMGIINPSGGSTIYAQKFQGRVTMTRDTSTSTVYMELSSLRSEDTAVYYCAKDWSSWYLGPFDYWGQGTLVTVSS

SEQ ID NO: 436 - protein, 107 aa, Artificial Sequence
  synthetic sequence
DIQMTQSPSSLSASVGDRVTITCRASQNISSSLNWYQQKPGKAPKLLIYAASSLQSGVPSRFSGSGSGTDFTLTISSLQPEDFATYYCQQSYTTPYTFGQGTKVEIK

SEQ ID NO: 437 - protein, 13 aa, Artificial Sequence
  synthetic sequence
GIINHSGGSTSYA

SEQ ID NO: 438 - protein, 15 aa, Artificial Sequence
  synthetic sequence
CARPYSGWYFAFDIW

SEQ ID NO: 439 - protein, 11 aa, Artificial Sequence
  synthetic sequence
RASQSISSSLN

SEQ ID NO: 440 - protein, 9 aa, Artificial Sequence
  synthetic sequence
QQSYSTPLT

SEQ ID NO: 441 - protein, 120 aa, Artificial Sequence
  synthetic sequence
QVQLVQSGAEVKKPGASVKVSCKASGYTFTSYYMHWVRQAPGQGLEWMGIINHSGGSTSYAQKFQGRVTMTRDTSTSTVYMELSSLRSEDTAVYYCARPYSGWYFAFDIWGQGTLVTVSS

SEQ ID NO: 442 - protein, 107 aa, Artificial Sequence
  synthetic sequence
DIQMTQSPSSLSASVGDRVTITCRASQSISSSLNWYQQKPGKAPKLLIYAASTLQSGVPSRFSGSGSGTDFTLTISSLQPEDFATYYCQQSYSTPLTFGQGTKVEIK

SEQ ID NO: 443 - protein, 121 aa, Artificial Sequence
  synthetic sequence
EVQLLESGGGLVQPGGSLRLSCAASGFMFGDYAMHWVRQAPGKGLEWVSAISGSGGSTYYADSVKGRFTISRDNSKNTLYLQMNSLRAEDTAVYYCAKDLVVAGIWYFDLWGRGTLVTVSS

SEQ ID NO: 444 - protein, 107 aa, Artificial Sequence
  synthetic sequence
DIQMTQSPSSLSASVGDRVTITCRASQGISNNLNWYQQKPGKAPKLLIYDASSLESGVPSRFSGSGSGTDFTLTISSLQPEDFATYYCQQTHSFPSTFGQGTKLEIK

SEQ ID NO: 445 - protein, 123 aa, Artificial Sequence
  synthetic sequence
EVQLLESGGGLVQPGGSLRLSCAASGFTFSDYYMNWVRQAPGKGLEWVSVIGESGGSTYYADSVKGRFTISRDNSKNTLYLQMNSLRAEDTAVYYCAADPVSRWPKHGGGDYWGQGTLVTVSS

SEQ ID NO: 446 - protein, 107 aa, Artificial Sequence
  synthetic sequence
DIQMTQSPSSLSASVGDRVTITCRASQGISSSLAWYQQKPGKAPKLLIYAASTLQSGVPSRFSGSGSGTDFTLTISSLQPEDFATYYCQQSYSTPWTFGQGTKVEIK

SEQ ID NO: 447 - protein, 118 aa, Artificial Sequence
  synthetic sequence
QVQLVQSGAEVKKPGASVKVSCKASGYTLTTWYMYWVRQAPGQGLEWMGWINPNRGATNYAQKFQGRVTMTRDTSTSTVYMELSSLRSEDTAVYYCAKGDLWGAMDVWGQGTLVTVSS

SEQ ID NO: 448 - protein, 107 aa, Artificial Sequence
  synthetic sequence
DIQMTQSPSSLSASVGDRVTITCRASDNIGSWLAWYQQKPGKAPKLLIYAASSLQSGVPSRFSGSGSGTDFTLTISSLQPEDFATYYCQQGYSTPPTFGQGTKVEIK

SEQ ID NO: 449 - protein, 127 aa, Artificial Sequence
  synthetic sequence
QVQLVQSGAEVKKPGASVKVSCKASGYTFTTYYMHWVRQAPGQGLEWMGGFDPEDGETIYAQKFQGRVTMTRDTSTSTVYMELSSLRSEDTAVYYCARHAVAGAVGAGYYYYGMDVWGQGTMVTVSS

SEQ ID NO: 450 - protein, 107 aa, Artificial Sequence
  synthetic sequence
DIQMTQSPSSLSASVGDRVTITCRASESISNWLAWYQQKPGKAPKLLIYAASTLQSGVPSRFSGSGSGTDFTLTISSLQPEDFATYYCQQSYSVPFTFGPGTKVDIK

SEQ ID NO: 451 - protein, 13 aa, Artificial Sequence
  synthetic sequence
GGIIPIVDGVKYA

SEQ ID NO: 452 - protein, 17 aa, Artificial Sequence
  synthetic sequence
CAKGQFTGNYYYGMDYW

SEQ ID NO: 453 - protein, 5 aa, Artificial Sequence
  synthetic sequence
SKLEA

SEQ ID NO: 454 - protein, 9 aa, Artificial Sequence
  synthetic sequence
QQSSEIPYS

SEQ ID NO: 455 - protein, 122 aa, Artificial Sequence
  synthetic sequence
QVQLVQSGAEVKKPGSSVKVSCKASGYTFTNYYMHWVRQAPGQGLEWMGGIIPIVDGVKYAQKFQGRVTITADESTSTAYMELSSLRSEDTAVYYCAKGQFTGNYYYGMDYWGQGTLVTVSS

SEQ ID NO: 456 - protein, 107 aa, Artificial Sequence
  synthetic sequence
DIQMTQSPSSLSASVGDRVTITCQANQDISNYLNWYQQKPGKAPKLLIYRASKLEAGVPSRFSGSGSGTDFTLTISSLQPEDFATYYCQQSSEIPYSFGQGTKVEIK

SEQ ID NO: 457 - protein, 119 aa, Artificial Sequence
  synthetic sequence
QVQLVQSGAEVKKPGASVKVSCKASGYTFTGYYMHWVRQAPGQGLEWMGWIGPNSGDTNYAQKFQGRVTMTRDTSTSTVYMELSSLRSEDTAVYYCARDLDHNWYFDLWGRGTLVTVSS

SEQ ID NO: 458 - protein, 112 aa, Artificial Sequence
  synthetic sequence
DIVMTQSPLSLPVTPGEPASISCRSSQSLLHSNGYNYLDWYLQKPGQSPQLLIYSSSNRAPGVPDRFSGSGSGTDFTLKISRVEAEDVGVYYCMQALHIPLTFGGGTKVEIK

SEQ ID NO: 459 - protein, 121 aa, Artificial Sequence
  synthetic sequence
EVQLLESGGGLVQPGGSLRLSCAASGFTFDDYAMHWVRQAPGKGLEWVSYIDASGTTIYYADSVKGRFTISRDNSKNTLYLQMNSLRAEDTAVYYCAKDQAAAGYWYFDLWGRGTLVTVSS

SEQ ID NO: 460 - protein, 107 aa, Artificial Sequence
  synthetic sequence
DIQMTQSPSSLSASVGDRVTITCQASQDISNYLNWYQQKPGKAPKLLIYKASTLESGVPSRFSGSGSGTDFTLTISSLQPEDFATYYCQQSYSTPITFGQGTRLEIK

SEQ ID NO: 461 - protein, 120 aa, Artificial Sequence
  synthetic sequence
QVQLVQSGAEVKKPGSSVKVSCKASGYTFTDYHIHWVRQAPGQGLEWMGGIVPRSGSTTYAQKFQGRVTITADESTSTAYMELSSLRSEDTAVYYCAKDESSGWYYFDYWGQGTLVTVSS

SEQ ID NO: 462 - protein, 112 aa, Artificial Sequence
  synthetic sequence
DIVMTQSPLSLPVTPGEPASISCRSSQSLLHSNGYNYLDWYLQKPGQSPQLLIYSAYNRASGVPDRFSGSGSGTDFTLKISRVEAEDVGVYYCMQALQTPLTFGQGTKVEIK

SEQ ID NO: 463 - protein, 122 aa, Artificial Sequence
  synthetic sequence
QVQLVQSGAEVKKPGSSVKVSCKASGYTFTNYYMHWVRQAPGQGLEWMGGIIPIVDRVKYAQKFQGRVTITADESTSTAYMELSSLRSEDTAVYYCAKGRYTVNYYYGMDVWGQGTTVTVSS

SEQ ID NO: 464 - protein, 107 aa, Artificial Sequence
  synthetic sequence
DIQMTQSPSSLSASVGDRVTITCQANQDISNYLNWYQQKPGKAPKLLIYRASKLEAGVPSRFSGSGSGTDFTLTISSLQPEDFATYYCQQSSEIPYSFGQGTKLEIK

SEQ ID NO: 465 - protein, 121 aa, Artificial Sequence
  synthetic sequence
EVQLLESGGGLVQPGGSLRLSCAASGFTFEDYAMHWVRQAPGKGLEWVSYLNSDGGSTSYADSVKGRFTISRDNSKNTLYLQMNSLRAEDTAVYYCAKDYCTNGVCAFDYWGQGTLVTVSS

SEQ ID NO: 466 - protein, 107 aa, Artificial Sequence
  synthetic sequence
DIQMTQSPSSLSASVGDRVTITCRASQSISTYLNWYQQKPGKAPKLLIYDASNLETGVPSRFSGSGSGTDFTLTISSLQPEDFATYYCQQSYTIPITFGQGTRLEIK

SEQ ID NO: 467 - protein, 121 aa, Artificial Sequence
  synthetic sequence
EVQLLESGGGLVQPGGSLRLSCAASGFTFSDSAMHWVRQAPGKGLEWVSAISGSGSTIYYADSVKGRFTISRDNSKNTLYLQMNSLRAEDTAVYYCVSDIAVAGHWYFDLWGRGTLVTVSS

SEQ ID NO: 468 - protein, 107 aa, Artificial Sequence
  synthetic sequence
DIQMTQSPSSLSASVGDRVTITCRASQSISTFLNWYQQKPGKAPKLLIYAASRLEGGVPSRFSGSGSGTDFTLTISSLQPEDFATYYCQQANSFPLTFGPGTKVDIK

SEQ ID NO: 469 - protein, 122 aa, Artificial Sequence
  synthetic sequence
EVQLVESGGGLVKPGGSLRLSCAASGFTFSSYWMSWVRQAPGKGLEWVSYISGDSGYTNYAAPVKGRFTISRDDSKNTLYLQMNSLKTEDTAVYYCARANSSGWYDWYFDLWGRGTLVTVSS

SEQ ID NO: 470 - protein, 107 aa, Artificial Sequence [sequence omitted]

SEQ ID NO: 471 - protein, 123 aa, Artificial Sequence
  synthetic sequence
EVQLLESGGGLVQPGGSLRLSCAASGFTFDDYAMHWVRQAPGKGLEWVSGISWNSGSIGYADSVKGRFTISRDNSKNTLYLQMNSLRAEDTAVYYCAKDIVAAGHYYYGMDVWGQGTTVTVSS

SEQ ID NO: 472 - protein, 107 aa, Artificial Sequence
  synthetic sequence
DIQMTQSPSSLSASVGDRVTITCQASQDISNYLNWYQQKPGKAPKLLIYDASNLETGVPSRFSGSGSGTDFTLTISSLQPEDFATYYCQQSYSTPLTFGGGTKVEIK

SEQ ID NO: 473 - protein, 121 aa, Artificial Sequence
  synthetic sequence
EVQLLESGGGLVQPGGSLRLSCAASGFTFDDYAMHWVRQAPGKGLEWVSYIDTSSSHLYYADSVKGRFTISRDNSKNTLYLQMNSLRAEDTAVYYCARDEAAAGYYGMDVWGQGTTVTVSS

SEQ ID NO: 474 - protein, 107 aa, Artificial Sequence
  synthetic sequence
DIQMTQSPSSLSASVGDRVTITCQAGQDISNYLNWYQQKPGKAPKLLIYDASNLETGVPSRFSGSGSGTDFTLTISSLQPEDFATYYCQQTYSTPITFGQGTKLEIK

SEQ ID NO: 475 - protein, 13 aa, Artificial Sequence
  synthetic sequence
SRISSDGRITTYA

SEQ ID NO: 476 - protein, 18 aa, Artificial Sequence
  synthetic sequence
CARGTSYCTGGVCDIDYW

SEQ ID NO: 477 - protein, 11 aa, Artificial Sequence
  synthetic sequence
RASQSIGRNLN

SEQ ID NO: 478 - protein, 5 aa, Artificial Sequence
  synthetic sequence
SNLQS

SEQ ID NO: 479 - protein, 9 aa, Artificial Sequence
  synthetic sequence
QQSYSIPLT

SEQ ID NO: 480 - protein, 123 aa, Artificial Sequence
  synthetic sequence
EVQLVESGGGLVKPGGSLRLSCAASGFTFSSYWMSWVRQAPGKGLEWVSRISSDGRITTYAAPVKGRFTISRDDSKNTLYLQMNSLKTEDTAVYYCARGTSYCTGGVCDIDYWGQGTLVTVSS

SEQ ID NO: 481 - protein, 107 aa, Artificial Sequence
  synthetic sequence
DIQMTQSPSSLSASVGDRVTITCRASQSIGRNLNWYQQKPGKAPKLLIYSASNLQSGVPSRFSGSGSGTDFTLTISSLQPEDFATYYCQQSYSIPLTFGPGTKVDIK

SEQ ID NO: 482 - protein, 120 aa, Artificial Sequence
  synthetic sequence
EVQLLESGGGLVQPGGSLRLSCAASGFTFSNAWMSWVRQAPGKGLEWVSTIVGNGGATYYADSVKGRFTISRDNSKNTLYLQMNSLRAEDTAVYYCARDNPLRWQGMDVWGQGTLVTVSS

SEQ ID NO: 483 - protein, 107 aa, Artificial Sequence
  synthetic sequence
DIQMTQSPSSLSASVGDRVTITCRASQDISNYLNWYQQKPGKAPKLLIYAASSLQSGVPSRFSGSGSGTDFTLTISSLQPEDFATYYCQQSYSIPPTFGPGTKVDIK

SEQ ID NO: 484 - protein, 9 aa, Artificial Sequence
  synthetic sequence
FTFSSYAMS

SEQ ID NO: 485 - protein, 5 aa, Artificial Sequence
  synthetic sequence
SGLQS

SEQ ID NO: 486 - protein, 122 aa, Artificial Sequence
  synthetic sequence
EVQLLESGGGLVQPGGSLRLSCAASGFTFSSYAMSWVRQAPGKGLEWVSYISSSSTYTNYADSVKGRFTISRDNSKNTLYLQMNSLRAEDTAVYYCARANSSSWYDWYFDLWGQGTLVTVSS

SEQ ID NO: 487 - protein, 107 aa, Artificial Sequence
  synthetic sequence
DIQMTQSPSSLSASVGDRVTITCRASQSISSYLNWYQQKPGKAPKLLIYAASGLQSGVPSRFSGSGSGTDFTLTISSLQPEDFATYYCQQSYSTPLTFGGGTKVEIK

SEQ ID NO: 488 - protein, 122 aa, Artificial Sequence
  synthetic sequence
EVQLLESGGGLVQPGGSLRLSCAASGFTFSSYQMSWVRQAPGKGLEWVSYISSSSTYTNYADSVKGRFTISRDNSKNTLYLQMNSLRAEDTAVYYCARANSSSWYDWYFDLWGQGTLVTVSS

SEQ ID NO: 489 - protein, 123 aa, Artificial Sequence
  synthetic sequence
EVQLLESGGGLVQPGGSLRLSCAASGFTFSSYAMHWVRQAPGKGLEWVSGISGSGGSAYYADSVKGRFTISRDNSKNTLYLQMNSLRAEDTAVYYCATSQAPVDYYYYGMDVWGQGTTVTVSS

SEQ ID NO: 490 - protein, 107 aa, Artificial Sequence
  synthetic sequence
DIQMTQSPSSLSASVGDRVTITCRASQSISSWLAWYQQKPGKAPKLLIYAASNLQRGVPSRFSGSGSGTDFTLTISSLQPEDFATYYCQQSYSIPITFGQGTKVEIK

SEQ ID NO: 491 - protein, 122 aa, Artificial Sequence
  synthetic sequence
EVQLVESGGGLVKPGGSLRLSCAASGFTFSSYWMSWVRQAPGKGLEWVSYISGSSSYTNYAAPVKGRFTISRDDSKNTLYLQMNSLKTEDTAVYYCARVGSSGWYDWYFDLWGRGTLVTVSS

SEQ ID NO: 492 - protein, 107 aa, Artificial Sequence [sequence omitted]

SEQ ID NO: 493 - protein, 118 aa, Artificial Sequence
  synthetic sequence
QVQLVQSGAEVKKPGASVKVSCKASGYTLTTWYMYWVRQAPGQGLEWMGWINPNRGATNYAQKFQGRVTMTRDTSTSTVYMELSSLRSEDTAVYYCAKGDLWGAMDVWGQGTTVTVSS

SEQ ID NO: 494 - protein, 129 aa, Artificial Sequence
  synthetic sequence
QVQLVQSGAEVKKPGASVKVSCKASGYTFTGYYIHWVRQAPGQGLEWMGWMNPNSGNTGYAQKFQGRVTMTRDTSTSTVYMELSSLRSEDTAVYYCARDPGFLGYCSGGSCYDGWFDPWGQGTLVTVSS

SEQ ID NO: 495 - protein, 107 aa, Artificial Sequence
  synthetic sequence
DIQMTQSPSSLSASVGDRVTITCRASQSISSYLHWYQQKPGKAPKLLIYAASSLQSGVPSRFSGSGSGTDFTLTISSLQPEDFATYYCQQSYTAPYTFGQGTKLEIK

SEQ ID NO: 496 - protein, 24 aa, Artificial Sequence
  synthetic sequence
CARDPGFLGYSSGGSCYDGWFDPW

SEQ ID NO: 497 - protein, 129 aa, Artificial Sequence
  synthetic sequence
QVQLVQSGAEVKKPGASVKVSCKASGYTFTGYYIHWVRQAPGQGLEWMGWMNPNSGNTGYAQKFQGRVTMTRDTSTSTVYMELSSLRSEDTAVYYCARDPGFLGYSSGGSSYDGWFDPWGQGTLVTVSS

SEQ ID NO: 498 - protein, 9 aa, Artificial Sequence
  synthetic sequence
FTFDDYALH

SEQ ID NO: 499 - protein, 13 aa, Artificial Sequence
  synthetic sequence
SAISGDGRSTTYA

SEQ ID NO: 500 - protein, 17 aa, Artificial Sequence
  synthetic sequence
CARDGTVNGATGWFDPW

SEQ ID NO: 501 - protein, 11 aa, Artificial Sequence
  synthetic sequence
QASQDISKYLN

SEQ ID NO: 502 - protein, 5 aa, Artificial Sequence
  synthetic sequence
SNLET

SEQ ID NO: 503 - protein, 9 aa, Artificial Sequence
  synthetic sequence
QQSYSIPFT

SEQ ID NO: 504 - protein, 122 aa, Artificial Sequence
  synthetic sequence
EVQLLESGGGLVQPGGSLRLSCAASGFTFDDYALHWVRQAPGKGLEWVSAISGDGRSTTYADSVKGRFTISRDNSKNTLYLQMNSLRAEDTAVYYCARDGTVNGATGWFDPWGQGTLVTVSS

SEQ ID NO: 505 - protein, 107 aa, Artificial Sequence
  synthetic sequence
DIQMTQSPSSLSASVGDRVTITCQASQDISKYLNWYQQKPGKAPKLLIYDASNLETGVPSRFSGSGSGTDFTLTISSLQPEDFATYYCQQSYSIPFTFGPGTKVDIK

SEQ ID NO: 506 - protein, 9 aa, Artificial Sequence
  synthetic sequence
FTFSDYGMP

SEQ ID NO: 507 - protein, 121 aa, Artificial Sequence
  synthetic sequence
EVQLLESGGGLVQPGGSLRLSCAASGFTFSDYGMPWVRQAPGKGLEWVSAISGSGGSTYYADSVKGRFTISRDNSKNTLYLQMNSLRAEDTAVYYCARDGGWQPAAILDYWGQGTLVTVSS

SEQ ID NO: 508 - protein, 107 aa, Artificial Sequence
  synthetic sequence
DIQMTQSPSSLSASVGDRVTITCRASQGISNNLNWYQQKPGKAPKLLIYDASNLETGVPSRFSGSGSGTDFTLTISSLQPEDFATYYCQQSYSTPLTFGQGTKVEIK

SEQ ID NO: 509 - protein, 118 aa, Artificial Sequence
  synthetic sequence
QVQLVQSGAEVKKPGASVKVSCKASGYTFTDYFLHWVRQAPGQGLEWMGWMNPTSGNTGYAQKFQGRVTMTRDTSTSTVYMELSSLRSEDTAVYYCAREGEGSGFDYWGQGTLVTVSS

SEQ ID NO: 510 - protein, 107 aa, Artificial Sequence
  synthetic sequence
DIQMTQSPSSLSASVGDRVTITCRASQGINSWLAWYQQKPGKAPKLLIYDASNLETGVPSRFSGSGSGTDFTLTISSLQPEDFATYYCQQSYSTPLTFGGGTKVEIK

SEQ ID NO: 511 - protein, 120 aa, Artificial Sequence
  synthetic sequence
QVQLVQSGAEVKKPGASVKVSCKASGYTFTSYYMHWVRQAPGQGLEWMAWMNPNSGNTGYAQKFQGRVTMTRDTSTSTVYMELSSLRSEDTAVYYCARDYDFWSGSLGYWGQGTLVTVSS

SEQ ID NO: 512 - protein, 107 aa, Artificial Sequence
  synthetic sequence
DIQMTQSPSSLSASVGDRVTITCRASQGISNYLAWYQQKPGKAPKLLIYAASSLQSGVPSRFSGSGSGTDFTLTISSLQPEDFATYYCQQSYSTPWTFGQGTKVEIK

SEQ ID NO: 513 - protein, 125 aa, Artificial Sequence
  synthetic sequence
QVQLVQSGAEVKKPGASVKVSCKASGYTFTSYYMHWVRQAPGQGLEWMGIINPSGGSTSYAQKFQGRVTMTRDTSTSTVYMELSSLRSEDTAVYYCARDTGYSYGRYYYYGMDVWGQGTLVTVSS

SEQ ID NO: 514 - protein, 121 aa, Artificial Sequence
  synthetic sequence
QVQLVQSGAEVKKPGASVKVSCKASGYTLTDYYMHWVRQAPGQGLEWMGIINPSGGSTSYAQKFQGRVTMTRDTSTSTVYMELSSLRSEDTAVYYCAREEYSSSSGYFDYWGQGTLVTVSS

SEQ ID NO: 515 - protein, 107 aa, Artificial Sequence
  synthetic sequence
DIQMTQSPSSLSASVGDRVTITCRASQGISSWLAWYQQKPGKAPKLLIYAASSLQSGVPSRFSGSGSGTDFTLTISSLQPEDFATYYCQQSYSTPLTFGQGTKVEIK

SEQ ID NO: 516 - protein, 120 aa, Artificial Sequence
  synthetic sequence
QVQLVQSGAEVKKPGASVKVSCKASGYTFTSYGISWVRQAPGQGLEWMGWMHPKSGDTGLTQKFQGRVTMTRDTSTSTVYMELSSLRSEDTAVYYCARDTPYYYYGMDVWGQGTTVTVSS

SEQ ID NO: 517 - protein, 107 aa, Artificial Sequence
  synthetic sequence
DIQMTQSPSSLSASVGDRVTITCRASQSISSWLAWYQQKPGKAPKLLIYAASSLQSGVPSRFSGSGSGTDFTLTISSLQPEDFATYYCQQSYSVPITFGQGTKVEIK

SEQ ID NO: 518 - protein, 14 aa, Artificial Sequence
  synthetic sequence
CAKERFIDYGMDVW

SEQ ID NO: 519 - protein, 119 aa, Artificial Sequence
  synthetic sequence
EVQLLESGGGLVQPGGSLRLSCAASGFTFSSYAMSWVRQAPGKGLEWVSAISGSGGSTYYADSVKGRFTISRDNSKNTLYLQMNSLRAEDTAVYYCAKERFIDYGMDVWGQGTTVTVSS

SEQ ID NO: 520 - protein, 106 aa, Artificial Sequence
  synthetic sequence
DIQMTQSPSSLSASVGDRVTITCQASQDISNYLNWYQQKPGKAPKLLIYAASSLQSGVPSRFSGSGSGTDFTLTISSLQPEDFATYYCQQTYSGWTFGPGTKVDIK

SEQ ID NO: 521 - protein, 121 aa, Artificial Sequence
  synthetic sequence
EVQLVESGGGLVKPGGSLRLSCAASGFTFGDYAMSWVRQAPGKGLEWVSYISGDIGYTNYAAPVKGRFTISRDDSKNTLYLQMNSLKTEDTAVYYCARDVAATGNWYFDLWGRGTLVTVSS

SEQ ID NO: 522 - protein, 123 aa, Artificial Sequence
  synthetic sequence
EVQLLESGGGLVQPGGSLRLSCAASGFSFSSYTMNWVRQAPGKGLEWVSFITSSSRTIYYADSVKGRFTISRDNSKNTLYLQMNSLRAEDTAVYYCARDRRGDYGDSWYFDLWGRGTLVTVSS

SEQ ID NO: 523 - protein, 107 aa, Artificial Sequence
  synthetic sequence
EIVMTQSPATLSVSPGERATLSCRASQSVRNYLAWYQQKPGQAPRLLIYGASTRATGIPARFSGSGSGTEFTLTISSLQSEDFAVYYCQQYGSSPLTFGGGTKVEIK

SEQ ID NO: 524 - protein, 121 aa, Artificial Sequence
  synthetic sequence
QVQLVQSGAEVKKPGASVKVSCKASGYTFSKHFVHWVRQAPGQGLEWMGWMNPNSGNSGYAQKFQGRVTMTRDTSTSTVYMELSSLRSEDTAVYYCARGEGGYYYYGMDVWGQGTLVTVSS

SEQ ID NO: 525 - protein, 107 aa, Artificial Sequence
  synthetic sequence
DIQMTQSPSSLSASVGDRVTITCRASQSISSWLAWYQQKPGKAPKLLIYAASTLQSGVPSRFSGSGSGTDFTLTISSLQPEDFATYYCQQSYSTPWTFGQGTKVEIK

SEQ ID NO: 526 - protein, 120 aa, Artificial Sequence
  synthetic sequence
EVQLLESGGGLVQPGGSLRLSCAASGFTFGSYSMSWVRQAPGKGLEWVSAIGTGGGTYYADSVKGRFTISRDNSKNTLYLQMNSLRAEDTAVYYCAKGTPYYYYYGMDVWGQGTMVTVSS

SEQ ID NO: 527 - protein, 107 aa, Artificial Sequence
  synthetic sequence
DIQMTQSPSSLSASVGDRVTITCRASQPLSNWLAWYQQKPGKAPKLLIYAASSLQSGVPSRFSGSGSGTDFTLTISSLQPEDFATYYCQQAISFPLTFGGGTKVEIK

SEQ ID NO: 528 - protein, 125 aa, Artificial Sequence
  synthetic sequence
QVQLVQSGAEVKKPGASVKVSCKASGYTFTSYYMHWVRQAPGQGLEWMGWMNPNSGNTGYAQKFQGRVTMTRDTSTSTVYMELSSLRSEDTAVYYCARDLGYYDSSGYFGAFDIWGQGTTVTVSS

SEQ ID NO: 529 - protein, 107 aa, Artificial Sequence
  synthetic sequence
DIQMTQSPSSLSASVGDRVTITCQSSEDISSSLNWYQQKPGKAPKLLIYAASSLQIGVPSRFSGSGSGTDFTLTISSLQPEDFATYYCQQTYSTPYTFGQGTKVEIK

SEQ ID NO: 530 - protein, 122 aa, Artificial Sequence
  synthetic sequence
QVQLVQSGAEVKKPGASVKVSCKASGYTFTSYGISWVRQAPGQGLEWMGIINPRGGSTIFAQKFQGRVTMTRDTSTSTVYMELSSLRSEDTAVYYCARGTRSSGWYGWFDPWGQGTLVTVSS

SEQ ID NO: 531 - protein, 107 aa, Artificial Sequence
  synthetic sequence
DIQMTQSPSSLSASVGDRVTITCRASQGIGNWLAWYQQKPGKAPKLLIYAASNLETGVPSRFSGSGSGTDFTLTISSLQPEDFATYYCQQIHSYPLTFGGGTKVEIK

SEQ ID NO: 532 - protein, 120 aa, Artificial Sequence
  synthetic sequence
EVQLVESGGGLVKPGGSLRLSCAASGFIFQDSAIHWVRQAPGKGLEWVSAIGTGGGTYYAAPVKGRFTISRDDSKNTLYLQMNSLKTEDTAVYYCARSYCSGGSCSLGSWGQGTLVTVSS

SEQ ID NO: 533 - protein, 112 aa, Artificial Sequence
  synthetic sequence
DIVMTQSPLSLPVTPGEPASISCRSSQSLLHSNGYNYLDWYLQKPGQSPQLLIYDASNLETGVPDRFSGSGSGTDFTLKISRVEAEDVGVYYCMQALQTPLTFGQGTKVEIK

SEQ ID NO: 534 - protein, 121 aa, Artificial Sequence
  synthetic sequence
EVQLLESGGGLVQPGGSLRLSCAASGFTFDDYGMSWVRQAPGKGLEWVSYISSSSSYIYYADSVKGRFTISRDNSKNTLYLQMNSLRAEDTAVYYCAREIAAAGFYGMDVWGQGTTVTVSS

SEQ ID NO: 535 - protein, 23 aa, Artificial Sequence
  synthetic sequence
CAREGLGYCTNGVCWNYYGMDVW

SEQ ID NO: 536 - protein, 9 aa, Artificial Sequence
  synthetic sequence
QQSYSTPYT

SEQ ID NO: 537 - protein, 128 aa, Artificial Sequence
  synthetic sequence
QVQLVQSGAEVKKPGASVKVSCKASGYTFTSYYMHWVRQAPGQGLEWMGWMNPNSGNTGYAQKFQGRVTMTRDTSTSTVYMELSSLRSEDTAVYYCAREGLGYCTNGVCWNYYGMDVWGQGTLVTVSS

SEQ ID NO: 538 - protein, 107 aa, Artificial Sequence
  synthetic sequence
DIQMTQSPSSLSASVGDRVTITCRASQGISSWLAWYQQKPGKAPKLLIYGASSLQSGVPSRFSGSGSGTDFTLTISSLQPEDFATYYCQQSYSTPYTFGQGTKVEIK

SEQ ID NO: 539 - protein, 126 aa, Artificial Sequence
  synthetic sequence
QVQLVQSGAEVKKPGSSVKVSCKASGGTLSRYGVSWVRQAPGQGLEWMGGIIPIFGTTNYAQKFQGRVTITADESTSTAYMELSSLRSEDTAVYYCARDRVYYDSSGYPTWYFDLWGRGTLVTVSS

SEQ ID NO: 540 - protein, 108 aa, Artificial Sequence
  synthetic sequence
EIVMTQSPATLSVSPGERATLSCRASQSVSSSYLAWYQQKPGQAPRLLIYGASTRATGIPARFSGSGSGTEFTLTISSLQSEDFAVYYCQQYGSSPITFGQGTKVEIK

SEQ ID NO: 541 - protein, 121 aa, Artificial Sequence
  synthetic sequence
EVQLLESGGGLVQPGGSLRLSCAASGFTFDDFAMHWVRQAPGKGLEWVSGISGNGDSRYYADSVKGRFTISRDNSKNTLYLQMNSLRAEDTAVYYCARDASYGGNYGMDVWGQGTTVTVSS

SEQ ID NO: 542 - protein, 107 aa, Artificial Sequence
  synthetic sequence
DIQMTQSPSSLSASVGDRVTITCQASQDIRNYLNWYQQKPGKAPKLLIYKASTLESGVPSRFSGSGSGTDFTLTISSLQPEDFATYYCQQANSFPLTFGPGTKVDIK

SEQ ID NO: 543 - protein, 119 aa, Artificial Sequence
  synthetic sequence
EVQLVESGGGLVKPGGSLRLSCAASGFTFSSYWMSWVRQAPGKGLEWVSAIGTGGGTYYAAPVKGRFTISRDDSKNTLYLQMNSLKTEDTAVYYCAREWLVPYYGMDVWGQGTTVTVSS

SEQ ID NO: 544 - protein, 107 aa, Artificial Sequence
  synthetic sequence
DIQMTQSPSSLSASVGDRVTITCRASQSISRWLAWYQQKPGKAPKLLIYGASNLQSGVPSRFSGSGSGTDFTLTISSLQPEDFATYYCQQSYSTPWTFGQGTKVEIK

SEQ ID NO: 545 - protein, 120 aa, Artificial Sequence
  synthetic sequence
EVQLLESGGGLVQPGGSLRLSCAASGFSVSSNYMSWVRQAPGKGLEWVAGISYDGSSKPYADSVKGRFTISRDNSKNTLYLQMNSLRAEDTAVYYCARSRGIAARPLQHWGQGTLVTVSS

SEQ ID NO: 546 - protein, 113 aa, Artificial Sequence
  synthetic sequence
DIVMTQSPDSLAVSLGERATINCKSSQSVLYSSNNKNYLAWYQQKPGQPPKLLIYWASTRQSGVPDRFSGSGSGTDFTLTISSLQAEDVAVYYCHQYYGHPPTFGGGTKVEIK

SEQ ID NO: 547 - protein, 113 aa, Artificial Sequence
  synthetic sequence
DIVMTQSPDSLAVSLGERATINCKSSQSVLYSSNNKNYLAWYQQKPGQPPKLLIYQASTRQSGVPDRFSGSGSGTDFTLTISSLQAEDVAVYYCHQYYGHPPTFGGGTKVEIK

SEQ ID NO: 548 - protein, 121 aa, Artificial Sequence
  synthetic sequence
EVQLLESGGGLVQPGGSLRLSCAASGFSFSDYGMHWVRQAPGKGLEWVSAISGSGGSTYYADSVKGRFTISRDNSKNTLYLQMNSLRAEDTAVYYCARDGGWQPAAILDYWGQGTLVTVSS

SEQ ID NO: 549 - protein, 107 aa, Artificial Sequence
  synthetic sequence
DIQMTQSPSSLSASVGDRVTITCRASQGISNNLNWYQQKPGKAPKLLIYDASNLETGVPSRFSGSGSGTDFTLTISSLQPEDFATYYCQQSYSTPLTFGGGTKVEIK

SEQ ID NO: 550 - protein, 120 aa, Artificial Sequence
  synthetic sequence
EVQLLESGGGLVQPGGSLRLSCAASGFTFSDHGMHWVRQAPGKGLEWVSVIYGGESTYYADSVKGRFTISRDNSKNTLYLQMNSLRAEDTAVYYCARDPAVAGGGIFDYWGQGTLVTVSS

SEQ ID NO: 551 - protein, 107 aa, Artificial Sequence
  synthetic sequence
DIQMTQSPSSLSASVGDRVTITCRASQGISNYLAWYQQKPGKAPKLLIYDASNLETGVPSRFSGSGSGTDFTLTISSLQPEDFATYYCQQSYSTCYTFGQGTKLEIK

SEQ ID NO: 552 - protein, 122 aa, Artificial Sequence
  synthetic sequence
QVQLVQSGAEVKKPGASVKVSCKASGDTFTGYYIHWVRQAPGQGLEWMGWINPNSGGTNYAQKFQGRVTMTRDTSTSTVYMELSSLRSEDTAVYYCARSGLWLGSYYGMDVWGQGTLVTVSS

SEQ ID NO: 553 - protein, 107 aa, Artificial Sequence
  synthetic sequence
DIQMTQSPSSLSASVGDRVTITCRASQTISIWLAWYQQKPGKAPKLLIYDASTLQSGVPSRFSGSGSGTDFTLTISSLQPEDFATYYCQQYSSYPLTFGQGTKVEIK

SEQ ID NO: 554 - protein, 119 aa, Artificial Sequence
  synthetic sequence
QVQLVQSGAEVKKPGASVKVSCKASGYTFTSYDINWVRQAPGQGLEWMGWINPNSGTTGYAQKFQGRVTMTRDTSTSTVYMELSSLRSEDTAVYYCARSPYYYYGMDVWGQGTTVTVSS

SEQ ID NO: 555 - protein, 106 aa, Artificial Sequence
  synthetic sequence
DIQMTQSPSSLSASVGDRVTITCRASHFISRWVAWYQQKPGKAPKLLIYAASTLQSGVPSRFSGSGSGTDFTLTISSLQPEDFATYYCQQSYSGISFGPGTKVDIK

SEQ ID NO: 556 - protein, 119 aa, Artificial Sequence
  synthetic sequence
EVQLLESGGGLVQPGGSLRLSCAASGFTFNNYGMNWVRQAPGKGLEWVSRINSDGSSTSYADSVKGRFTISRDNSKNTLYLQMNSLRAEDTAVYYCARGAYYYYYMDVWGQGTLVTVSS

SEQ ID NO: 557 - protein, 107 aa, Artificial Sequence
  synthetic sequence
EIVMTQSPATLSVSPGERATLSCRASQSVSGSYLAWYQQKPGQAPRLLIYATSSRASGIPARFSGSGSGTEFTLTISSLQSEDFAVYYCQQYYSGLTFGQGTKVEIK

SEQ ID NO: 558 - protein, 122 aa, Artificial Sequence
  synthetic sequence
EVQLLESGGGLVQPGGSLRLSCAASGFTFSNSDMNWVRQAPGKGLEWVAHIWNDGSQKYYADSVKGRFTISRDNSKNTLYLQMNSLRAEDTAVYYCARDRTDPGYSSAMDVWGQGTTVTVSS

SEQ ID NO: 559 - protein, 107 aa, Artificial Sequence
  synthetic sequence
DIQMTQSPSSLSASVGDRVTITCRASQDIRNYLGWYQQKPGKAPKLLIYDASSLETGVPSRFSGSGSGTDFTLTISSLQPEDFATYYCQQATSLPLTFGGGTKVEIK

SEQ ID NO: 560 - protein, 120 aa, Artificial Sequence
  synthetic sequence
QVQLVQSGAEVKKPGASVKVSCKASGYTFTSYDINWVRQAPGQGLEWMGWMNPNSGNTGYAQKFQGRVTMTRDTSTSTVYMELSSLRSEDTAVYYCAKDSDYSNLLWDYWGQGTLVTVSS

SEQ ID NO: 561 - protein, 107 aa, Artificial Sequence
  synthetic sequence
DIQMTQSPSSLSASVGDRVTITCRASQDITNDLGWYQQKPGKAPKLLIYQASSLESGVPSRFSGSGSGTDFTLTISSLQPEDFATYYCQQSYTIPLTFGQGTKVEIK

SEQ ID NO: 562 - protein, 19 aa, Artificial Sequence
  synthetic sequence
CARDGAWFGEEYYYGMDVW

SEQ ID NO: 563 - protein, 11 aa, Artificial Sequence
  synthetic sequence
RASQGISNWLA

SEQ ID NO: 564 - protein, 10 aa, Artificial Sequence
  synthetic sequence
QQYYSFPLYT

SEQ ID NO: 565 - protein, 124 aa, Artificial Sequence
  synthetic sequence
QVQLVQSGAEVKKPGASVKVSCKASGYTFTGHYMHWVRQAPGQGLEWMGIINPSGGSTSYAQKFQGRVTMTRDTSTSTVYMELSSLRSEDTAVYYCARDGAWFGEEYYYGMDVWGQGTTVTVSS

SEQ ID NO: 566 - protein, 108 aa, Artificial Sequence
  synthetic sequence
DIQMTQSPSSLSASVGDRVTITCRASQGISNWLAWYQQKPGKAPKLLIYDASNLETGVPSRFSGSGSGTDFTLTISSLQPEDFATYYCQQYYSFPLYTFGQGTKVEIK

SEQ ID NO: 567 - protein, 13 aa, Artificial Sequence
  synthetic sequence
GMIYPRDGSTSYA

SEQ ID NO: 568 - protein, 13 aa, Artificial Sequence
  synthetic sequence
CAMTGWGYGMDVW

SEQ ID NO: 569 - protein, 11 aa, Artificial Sequence
  synthetic sequence
RASQGINNYLA

SEQ ID NO: 570 - protein, 9 aa, Artificial Sequence
  synthetic sequence
QQSYSAPPT

SEQ ID NO: 571 - protein, 118 aa, Artificial Sequence
  synthetic sequence
QVQLVQSGAEVKKPGASVKVSCKASGYTFTGYYMHWVRQAPGQGLEWMGMIYPRDGSTSYAQKFQGRVTMTRDTSTSTVYMELSSLRSEDTAVYYCAMTGWGYGMDVWGKGTTVTVSS

SEQ ID NO: 572 - protein, 107 aa, Artificial Sequence
  synthetic sequence
DIQMTQSPSSLSASVGDRVTITCRASQGINNYLAWYQQKPGKAPKLLIYDASTLQSGVPSRFSGSGSGTDFTLTISSLQPEDFATYYCQQSYSAPPTFGQGTKLEIK

SEQ ID NO: 573 - protein, 121 aa, Artificial Sequence
  synthetic sequence
EVQLLESGGGLVQPGGSLRLSCAASGFTFGDYAMSWVRQAPGKGLEWVAVVSYDGTNKYYADSVKGRFTISRDNSKNTLYLQMNSLRAEDTAVYYCAKDICSSTSCYFDLWGRGTLVTVSS

SEQ ID NO: 574 - protein, 107 aa, Artificial Sequence
  synthetic sequence
DIQMTQSPSSLSASVGDRVTITCRASQNINNYVNWYQQKPGKAPKLLIYDASNLETGVPSRFSGSGSGTDFTLTISSLQPEDFATYYCQQANSFPPTFGQGTRLEIK

SEQ ID NO: 575 - protein, 122 aa, Artificial Sequence
  synthetic sequence
QVQLVQSGAEVKKPGASVKVSCKASGYTFTSYYMHWVRQAPGQGLEWMGIIDPSGGSTSYAQKFQGRVTMTRDTSTSTVYMELSSLRSEDTAVYYCAREEWSSGGVGYFDYWGQGTLVTVSS

SEQ ID NO: 576 - protein, 107 aa, Artificial Sequence
  synthetic sequence
DIQMTQSPSSLSASVGDRVTITCRASQGISSYLAWYQQKPGKAPKLLIYATSSLQTGVPSRFSGSGSGTDFTLTISSLQPEDFATYYCQQTYSIPITFGQGTRLEIK

SEQ ID NO: 577 - protein, 9 aa, Artificial Sequence
  synthetic sequence
YPFTDYYMH

SEQ ID NO: 578 - protein, 13 aa, Artificial Sequence
  synthetic sequence
GWIKPNSGDTEYA

SEQ ID NO: 579 - protein, 20 aa, Artificial Sequence
  synthetic sequence
CARDRFVGKPDYYYYGMDVW

SEQ ID NO: 580 - protein, 11 aa, Artificial Sequence
  synthetic sequence
RASQSISVWLA

SEQ ID NO: 581 - protein, 9 aa, Artificial Sequence
  synthetic sequence
QQSYDTPYT

SEQ ID NO: 582 - protein, 125 aa, Artificial Sequence
  synthetic sequence
QVQLVQSGAEVKKPGASVKVSCKASGYPFTDYYMHWVRQAPGQGLEWMGWIKPNSGDTEYAQKFQGRVTMTRDTSTSTVYMELSSLRSEDTAVYYCARDRFVGKPDYYYYGMDVWGQGTMVTVSS

SEQ ID NO: 583 - protein, 107 aa, Artificial Sequence
  synthetic sequence
DIQMTQSPSSLSASVGDRVTITCRASQSISVWLAWYQQKPGKAPKLLIYAASSLQSGVPSRFSGSGSGTDFTLTISSLQPEDFATYYCQQSYDTPYTFGQGTKLEIK

SEQ ID NO: 584 - protein, 124 aa, Artificial Sequence
  synthetic sequence
QVQLVQSGAEVKKPGASVKVSCKASGYTFTSYYMHWVRQAPGQGLEWMGIINPSGGSTSYAQKFQGRVTMTRDTSTSTVYMELSSLRSEDTAVYYCARDSVAGTGGRYYGMDVWGQGTLVTVSS

SEQ ID NO: 585 - protein, 107 aa, Artificial Sequence
  synthetic sequence
DIQMTQSPSSLSASVGDRVTITCRASQGISNYFAWYQQKPGKAPKLLIYAASSLQGGVPSRFSGSGSGTDFTLTISSLQPEDFATYYCQQSYSLPYTFGQGTKLEIK

SEQ ID NO: 586 - protein, 13 aa, Artificial Sequence
  synthetic sequence
GVINPIGGTTTYA

SEQ ID NO: 587 - protein, 16 aa, Artificial Sequence
  synthetic sequence
CASGAPSYYYYGMDVW

SEQ ID NO: 588 - protein, 5 aa, Artificial Sequence
  synthetic sequence
SYLAT

SEQ ID NO: 589 - protein, 121 aa, Artificial Sequence
  synthetic sequence
QVQLVQSGAEVKKPGASVKVSCKASGYTFTSYYMHWVRQAPGQGLEWMGVINPIGGTTTYAQKFQGRVTMTRDTSTSTVYMELSSLRSEDTAVYYCASGAPSYYYYGMDVWGQGTLVTVSS

SEQ ID NO: 590 - protein, 107 aa, Artificial Sequence
  synthetic sequence
DIQMTQSPSSLSASVGDRVTITCRASQSISSYLNWYQQKPGKAPKLLIYGTSYLATGVPSRFSGSGSGTDFTLTISSLQPEDFATYYCQQSYSTPLTFGQGTKVEIK

SEQ ID NO: 591 - protein, 248 aa, Artificial Sequence
  synthetic sequence
QVQLVQSGAEVKKPGASVKVSCKASGGTFSSYAISWVRQAPGQGLEWMGSINPSGDTTSYAQKFQGRVTMTRDTSTSTVYMELSSLRSEDTAVYYCAKDKAQWLVGYFDYWGQGTLVTVSSGGGGSGGGGSGGGGSGGGGSDIQMTQSPSSLSASVGDRVTITCQASQDISNSLNWYQQKPGKAPKLLIYAASSLQSGVPSRFSGSGSGTDFTLTISSLQPEDFATYYCQQSYSSVITFGQGTKVEIK

SEQ ID NO: 592 - protein, 9 aa, Artificial Sequence
  synthetic sequence
YTFTSNYVH

SEQ ID NO: 593 - protein, 13 aa, Artificial Sequence
  synthetic sequence
GRINPHSGDTSYA

SEQ ID NO: 594 - protein, 16 aa, Artificial Sequence
  synthetic sequence
CARAGQLWSDWYFDLW

SEQ ID NO: 595 - protein, 5 aa, Artificial Sequence
  synthetic sequence
TALRT

SEQ ID NO: 596 - protein, 9 aa, Artificial Sequence
  synthetic sequence
QQSYSHPLT

SEQ ID NO: 597 - protein, 121 aa, Artificial Sequence
  synthetic sequence
QVQLVQSGAEVKKPGASVKVSCKASGYTFTSNYVHWVRQAPGQGLEWMGRINPHSGDTSYAQKFQGRVTMTRDTSTSTVYMELSSLRSEDTAVYYCARAGQLWSDWYFDLWGRGTLVTVSS

SEQ ID NO: 598 - protein, 107 aa, Artificial Sequence
  synthetic sequence
DIQMTQSPSSLSASVGDRVTITCQASQDIRNYLNWYQQKPGKAPKLLIYAATALRTGVPSRFSGSGSGTDFTLTISSLQPEDFATYYCQQSYSHPLTFGQGTKVEIK

SEQ ID NO: 599 - protein, 118 aa, Artificial Sequence
  synthetic sequence
QVQLVQSGAEVKKPGASVKVSCKASGYTFTGYYMHWVRQAPGQGLEWMGIINPSGGNTKYAQKFQGRVTMTRDTSTSTVYMELSSLRSEDTAVYYCTTADYYYYMDVWGKGTTVTVSS

SEQ ID NO: 600 - protein, 106 aa, Artificial Sequence
  synthetic sequence
DIQMTQSPSSLSASVGDRVTITCRASQGISNYLAWYQQKPGKAPKLLIYAASSLQSGVPSRFSGSGSGTDFTLTISSLQPEDFATYYCQQYYSNADFGQGTKVEIK

SEQ ID NO: 601 - protein, 119 aa, Artificial Sequence
  synthetic sequence
EVQLLESGGGLVQPGGSLRLSCAASGFTFSDFWMHWVRQAPGKGLEWISYISGDSGYTNYADSVKGRFTISRDNSKNTLYLQMNSLRAEDTAVYYCARDRPYYYYMDVWGKGTTVTVSS

SEQ ID NO: 602 - protein, 107 aa, Artificial Sequence
  synthetic sequence
DIQMTQSPSSLSASVGDRVTITCRASQSVSRSLAWYQQKPGKAPKLLIYAASSLQSGVPSRFSGSGSGTDFTLTISSLQPEDFATYYCQQYKSYPVTFGQGTKVEIK

SEQ ID NO: 603 - protein, 122 aa, Artificial Sequence
  synthetic sequence
EVQLLESGGGLVQPGGSLRLSCAASGFTFDDYTMHWVRQAPGKGLEWVSDISGSGGSTYYADSVKGRFTISRDNSKNTLYLQMNSLRAEDTAVYYCAKDVVVAGTPLHFDYWGQGTLVTVSS

SEQ ID NO: 604 - protein, 107 aa, Artificial Sequence
  synthetic sequence
DIQMTQSPSSLSASVGDRVTITCQASQDISNYLNWYQQKPGKAPKLLIYAASYLQSGVPSRFSGSGSGTDFTLTISSLQPEDFATYYCQQAHNYPITFGQGTRLEIK

SEQ ID NO: 605 - protein, 119 aa, Artificial Sequence
  synthetic sequence
EVQLLESGGGLVQPGGSLRLSCAASEFTFSNAWMSWVRQAPGKGLEWVASISSTSAYIDYADSVKGRFTISRDNSKNTLYLQMNSLRAEDTAVYYCAREVVGATTFDYWGQGTLVTVSS

SEQ ID NO: 606 - protein, 107 aa, Artificial Sequence
  synthetic sequence
DIQMTQSPSSLSASVGDRVTITCRASQSISTWLAWYQQKPGKAPKLLIYAASSLQSGVPSRFSGSGSGTDFTLTISSLQPEDFATYYCQQANAFPPTFGQGTRLEIK

SEQ ID NO: 607 - protein, 117 aa, Artificial Sequence
  synthetic sequence
QVQLVQSGAEVKKPGSSVKVSCKASGGTFSSYAISWVRQAPGQGLEWMGWMEPHTGNTRYAQKFQGRVTITADESTSTAYMELSSLRSEDTAVYYCAKGGFSWFDPWGQGTLVTVSS

SEQ ID NO: 608 - protein, 113 aa, Artificial Sequence
  synthetic sequence
DIVMTQSPDSLAVSLGERATINCKSSQSVLYSSNNKNYLAWYQQKPGQPPKLLIYWASTRESGVPDRFSGSGSGTDFTLTISSLQAEDVAVYYCQQYYSTPPTFGQGTRLEIK

SEQ ID NO: 609 - protein, 120 aa, Artificial Sequence
  synthetic sequence
EVQLLESGGGLVKPGGSLRLSCAASGFTFDDYAMHWVRQAPGKGLEWVASITSSSAFIDYAASVKGRFTISRDDSKNTLYLQMNSLKTEDTAVYYCARERVDWNSYFDLWGRGTLVTVSS

SEQ ID NO: 610 - protein, 108 aa, Artificial Sequence
  synthetic sequence
EIVMTQSPATLSVSPGERATLSCRASQGISNSYLAWYQQKPGQAPRLLIYGASTRATGIPARFSGSGSGTEFTLTISSLQSEDFAVYYCQQYYTYPPTFGPGTKVDIK

SEQ ID NO: 611 - protein, 16 aa, Artificial Sequence
  synthetic sequence
CAKDLGVVVPAALDYW

SEQ ID NO: 612 - protein, 11 aa, Artificial Sequence
  synthetic sequence
QASQDISNHLN

SEQ ID NO: 613 - protein, 5 aa, Artificial Sequence
  synthetic sequence
SNLEA

SEQ ID NO: 614 - protein, 121 aa, Artificial Sequence
  synthetic sequence
EVQLLESGGGLVQPGGSLRLSCAASGFTFDDYAMHWVRQAPGKGLEWVSAISGSGGSTYYADSVKGRFTISRDNSKNTLYLQMNSLRAEDTAVYYCAKDLGVVVPAALDYWGQGTTVTVSS

SEQ ID NO: 615 - protein, 107 aa, Artificial Sequence
  synthetic sequence
DIQMTQSPSSLSASVGDRVTITCQASQDISNHLNWYQQKPGKAPKLLIYDASNLEAGVPSRFSGSGSGTDFTLTISSLQPEDFATYYCQQSYSTPLTFGGGTKVEIK

SEQ ID NO: 616 - protein, 119 aa, Artificial Sequence
  synthetic sequence
EVQLLESGGGLVKPGGSLRLSCAASGFAFSSHWMHWVRQAPGKGLEWVAGTSGSGESRDYADFVKGRFTISRDDSKNTLYLQMNSLKTEDTAVYYCARETYYYYYMDVWGKGTTVTVSS

SEQ ID NO: 617 - protein, 107 aa, Artificial Sequence
  synthetic sequence
DIQMTQSPSSLSASVGDRVTITCRASQGISNYLAWYQQKPGKAPKLLIYDAANLEGGVPSRFSGSGSGTDFTLTISSLQPEDFATYYCQQSDIFPPTFGQGTKVEIK

SEQ ID NO: 618 - protein, 119 aa, Artificial Sequence
  synthetic sequence
QVQLVQSGAEVKKPGASVKVSCKASGYTFTRHWIHWVRQAPGQGLEWMGWINVKTGGAGYAQKFQGRVTMTRDTSTSTVYMELSSLRSEDTAVYYCARESSGWYGTDVWGQGTTVTVSS

SEQ ID NO: 619 - protein, 107 aa, Artificial Sequence
  synthetic sequence
DIQMTQSPSSLSASVGDRATITCRASQSISNYLAWYQQKPGKAPKLLIYAASSLQSGVPSRFSGSGSGTDFTLTISSLQPEDFATYYCQQSNSFPLTFGGGTKVEIK

SEQ ID NO: 620 - protein, 120 aa, Artificial Sequence
  synthetic sequence
EVQLLESGGGLVQPGGSLRLSCAASGFTFSSYWMHWVRQAPGKGLEWVAAISYDGKYKDYEDSVKGRFTISRDNSKNTLYLQMNSLRAEDTAVYYCARENKQWLASFDYWGQGTLVTVSS

SEQ ID NO: 621 - protein, 106 aa, Artificial Sequence
  synthetic sequence
DIQMTQSPSSLSASVGDRVTITCQASQDISNFVNWYQQKPGKAPKLLIYAANLRSGVPSRFSGSGSGTDFTLTISSLQPEDFATYYCQQANSFPVTFGPGTKVDIK

SEQ ID NO: 622 - protein, 9 aa, Artificial Sequence
  synthetic sequence
GTFSSSAIS

SEQ ID NO: 623 - protein, 13 aa, Artificial Sequence
  synthetic sequence
GWISAYNGYTNYA

SEQ ID NO: 624 - protein, 16 aa, Artificial Sequence
  synthetic sequence
CASRVHSGGSYPDDYW

SEQ ID NO: 625 - protein, 11 aa, Artificial Sequence
  synthetic sequence
QASEHIYNYLN

SEQ ID NO: 626 - protein, 9 aa, Artificial Sequence
  synthetic sequence
QQTDSIPIT

SEQ ID NO: 627 - protein, 121 aa, Artificial Sequence
  synthetic sequence
QVQLVQSGAEVKKPGASVKVSCKASGGTFSSSAISWVRQAPGQGLEWMGWISAYNGYTNYAQKFQGRVTMTRDTSTSTVYMELSSLRSEDTAVYYCASRVHSGGSYPDDYWGQGTLVTVSS

SEQ ID NO: 628 - protein, 107 aa, Artificial Sequence
  synthetic sequence
DIQMTQSPSSLSASVGDRVTITCQASEHIYNYLNWYQQKPGKAPKLLIYAASSLQSGVPSRFSGSGSGTDFTLTISSLQPEDFATYYCQQTDSIPITFGQGTKVEIK

SEQ ID NO: 629 - protein, 118 aa, Artificial Sequence
  synthetic sequence
QVQLVQSGAEVKKPGASVKVSCKASGGSFTGYYMHWVRQAPGQGLEWMGWINPNDGAIHYAQNFQGRVTMTRDTSTSTVYMELSSLRSEDTAVYYCARDTVTGDFDYWGQGTLVTVSS

SEQ ID NO: 630 - protein, 107 aa, Artificial Sequence
  synthetic sequence
DIQMTQSPSSLSASVGDRVTITCQASHDIDKYLNWYQQKPGKAPKLLIYAASSLQSGVPSRFSGSGSGTDFTLTISSLQPEDFATYYCQQANSLPLTFGGGTKVEIK

SEQ ID NO: 631 - protein, 9 aa, Artificial Sequence
  synthetic sequence
GSFTGYYMH

SEQ ID NO: 632 - protein, 13 aa, Artificial Sequence
  synthetic sequence
GWINPNDGAIHYA

SEQ ID NO: 633 - protein, 13 aa, Artificial Sequence
  synthetic sequence
CARDTVTGDFDYW

SEQ ID NO: 634 - protein, 11 aa, Artificial Sequence
  synthetic sequence
QASHDIDKYLN

SEQ ID NO: 635 - protein, 9 aa, Artificial Sequence
  synthetic sequence
QQANSLPLT

SEQ ID NO: 636 - protein, 121 aa, Artificial Sequence
  synthetic sequence
QVQLVQSGAEVKKPGASVKVSCKASGGTFSRYAVSWVRQAPGQGLEWMGWINPNSGGTSYAQRFQGRVTMTRDTSTSTVYMELSSLRSEDTAVYYCAKQGDYGGGYYFDYWGQGTLVTVSS

SEQ ID NO: 637 - protein, 107 aa, Artificial Sequence
  synthetic sequence
DIQMTQSPSSLSASVGDRVTITCRASQSISSWLAWYQQKPGKAPKLLIYKTSTLESGVPSRFSGSGSGTDFTLTISSLQPEDFATYYCQQSYSTPFTFGQGTKVEIK

SEQ ID NO: 638 - protein, 9 aa, Artificial Sequence
  synthetic sequence
GTFSRYAVS

SEQ ID NO: 639 - protein, 13 aa, Artificial Sequence
  synthetic sequence
GWINPNSGGTSYA

SEQ ID NO: 640 - protein, 16 aa, Artificial Sequence
  synthetic sequence
CAKQGDYGGGYYFDYW

SEQ ID NO: 641 - protein, 5 aa, Artificial Sequence
  synthetic sequence
STLES

SEQ ID NO: 642 - protein, 9 aa, Artificial Sequence
  synthetic sequence
QQSYSTPFT

SEQ ID NO: 643 - protein, 120 aa, Artificial Sequence
  synthetic sequence
QVQLVQSGAEVKKPGASVKVSCKASGGTFSSYAISWVRQAPGQGLEWMGWMNPNSGNTGYAQKFQGRVTMTRDTSTSTVYMELSSLRSEDTAVYYCARVGYSYGYGMDVWGQGTTVTVSS

SEQ ID NO: 644 - protein, 107 aa, Artificial Sequence
  synthetic sequence
DIQMTQSPSSLSASVGDRVTITCRASQSINNWLAWYQQKPGKAPKLLIYAASSLQSGVPSRFSGSGSGTDFTLTISSLQPEDFATYYCQQSYSTPFTFGPGTKVDIK

SEQ ID NO: 645 - protein, 15 aa, Artificial Sequence
  synthetic sequence
CARVGYSYGYGMDVW

SEQ ID NO: 646 - protein, 11 aa, Artificial Sequence
  synthetic sequence
RASQSINNWLA

SEQ ID NO: 647 - protein, 113 aa, Artificial Sequence
  synthetic sequence
QVQLVQSGAEVKKPGASVKVSCKASGYSFTTYYMHWVRQAPGQGLEWMGIINPSGGSTSYAQKFQGRVTMTRDTSTSTVYMELSSLRSEDTAVYYCASGWVYWGQGTLVTVSS

SEQ ID NO: 648 - protein, 107 aa, Artificial Sequence
  synthetic sequence
DIQMTQSPSSLSASVGDRVTITCQASRDIKNYLAWYQQKPGKAPKLLIYAASSLQSGVPSRFSGSGSGTDFTLTISSLQPEDFATYYCQQSYSTPPTFGPGTKVDIK

SEQ ID NO: 649 - protein, 9 aa, Artificial Sequence
  synthetic sequence
YSFTTYYMH

SEQ ID NO: 650 - protein, 8 aa, Artificial Sequence
  synthetic sequence
CASGWVYW

SEQ ID NO: 651 - protein, 11 aa, Artificial Sequence
  synthetic sequence
QASRDIKNYLA

SEQ ID NO: 652 - protein, 9 aa, Artificial Sequence
  synthetic sequence
QQSYSTPPT

SEQ ID NO: 653 - protein, 119 aa, Artificial Sequence
  synthetic sequence
EVQLLESGGGLVQPGGSLRLSCAASGFTFSSYAMSWVRQAPGKGLEWVAAIWSDGSHQYYADSVKGRFTISRDNSKNTLYLQMNSLRAEDTAVYYCARGLGVERGLDYWGQGTLVTVSS

SEQ ID NO: 654 - protein, 107 aa, Artificial Sequence
  synthetic sequence
DIQMTQSPSSLSASVGDRVTITCRASQSISSWLAWYQQKPGKAPKLLIYAASTLQSGVPSRFSGSGSGTDFTLTISSLQPEDFATYYCQQSYSTPLTFGQGTKVEIK

SEQ ID NO: 655 - protein, 13 aa, Artificial Sequence
  synthetic sequence
AAIWSDGSHQYYA

SEQ ID NO: 656 - protein, 14 aa, Artificial Sequence
  synthetic sequence
CARGLGVERGLDYW

SEQ ID NO: 657 - protein, 124 aa, Artificial Sequence
  synthetic sequence
EVQLLESGGGLVQPGGSLRLSCAASGFTFSNYPMHWVRQAPGKGLEWVALISDDGTNEHYADSVKGRFTISRDNSKNTLYLQMNSLRAEDTAVYYCARDSKFANYYYYYDMDVWGQGTTVTVSS

SEQ ID NO: 658 - protein, 107 aa, Artificial Sequence
  synthetic sequence
DIQMTQSPSSLSASVGDRVTITCRASQSINNYLSWYQQKPGKAPKLLIYDASNLETGVPSRFSGSGSGTDFTLTISSLQPEDFATYYCQQSYSTPLTFGPGTKVDIK

SEQ ID NO: 659 - protein, 9 aa, Artificial Sequence
  synthetic sequence
FTFSNYPMH

SEQ ID NO: 660 - protein, 13 aa, Artificial Sequence
  synthetic sequence
ALISDDGTNEHYA

SEQ ID NO: 661 - protein, 19 aa, Artificial Sequence
  synthetic sequence
CARDSKFANYYYYYDMDVW

SEQ ID NO: 662 - protein, 11 aa, Artificial Sequence
  synthetic sequence
RASQSINNYLS

SEQ ID NO: 663 - protein, 124 aa, Artificial Sequence
  synthetic sequence
QVQLVQSGAEVKKPGASVKVSCKASGYSFTGHYIHWVRQAPGQGLEWMGIINPNGGSTTYAQKLQGRVTMTRDTSTSTVYMELSSLRSEDTAVYYCARGKFDFYGDYVTAFDIWGQGTMVTVSS

SEQ ID NO: 664 - protein, 113 aa, Artificial Sequence
  synthetic sequence
DIVMTQSPDSLAVSLGERATINCRSSQSILYSSNNRDYLAWYQQKPGQPPKLLIYWASTRQSGVPDRFSGSGSGTDFTLTISSLQAEDVAVYYCQQYYSIPVTFGGGTKVEIK

SEQ ID NO: 665 - protein, 9 aa, Artificial Sequence
  synthetic sequence
YSFTGHYIH

SEQ ID NO: 666 - protein, 13 aa, Artificial Sequence
  synthetic sequence
GIINPNGGSTTYA

SEQ ID NO: 667 - protein, 19 aa, Artificial Sequence
  synthetic sequence
CARGKFDFYGDYVTAFDIW

SEQ ID NO: 668 - protein, 17 aa, Artificial Sequence
  synthetic sequence
RSSQSILYSSNNRDYLA

SEQ ID NO: 669 - protein, 5 aa, Artificial Sequence
  synthetic sequence
STRQS

SEQ ID NO: 670 - protein, 9 aa, Artificial Sequence
  synthetic sequence
QQYYSIPVT

SEQ ID NO: 671 - protein, 128 aa, Artificial Sequence
  synthetic sequence
QVQLVQSGAEVKKPGASVKVSCKASGYTFSNYDMNWVRQAPGQGLEWMGWMNPNSGHTGSAPKFQGRVTMTRDTSTSTVYMELSSLRSEDTAVYYCARGAFGLHLGELSLHYYGMDVWGQGTTVTVSS

SEQ ID NO: 672 - protein, 107 aa, Artificial Sequence
  synthetic sequence
DIQMTQSPSSLSASVGDRVTITCRASQSINNWLAWYQQKPGKAPKLLIYAASSLQGGVPSRFSGSGSGTDFTLTISSLQPEDFATYYCQQSYSFPYTFGQGTKLEIK

SEQ ID NO: 673 - protein, 9 aa, Artificial Sequence
  synthetic sequence
YTFSNYDMN

SEQ ID NO: 674 - protein, 13 aa, Artificial Sequence
  synthetic sequence
GWMNPNSGHTGSA

SEQ ID NO: 675 - protein, 23 aa, Artificial Sequence
  synthetic sequence
CARGAFGLHLGELSLHYYGMDVW

SEQ ID NO: 676 - protein, 5 aa, Artificial Sequence
  synthetic sequence
SSLQG

SEQ ID NO: 677 - protein, 9 aa, Artificial Sequence
  synthetic sequence
QQSYSFPYT

SEQ ID NO: 678 - protein, 117 aa, Artificial Sequence
  synthetic sequence
QVQLVQSGAEVKKPGSSVKVSCKASGYTFTGYYMHWVRQAPGQGLEWMGKIVPMFDAANYAPKFQGRVTITADESTSTAYMELSSLRSEDTAVYYCARGPKWELDTWGQGTLVTVSS

SEQ ID NO: 679 - protein, 107 aa, Artificial Sequence
  synthetic sequence
DIQMTQSPSSLSASVGDRVTITCRASQSISRWLAWYQQKPGKAPKLLIYGASSLQSGVPSRFSGSGSGTDFTLTISSLQPEDFATYYCQQANSFPVTFGGGTKVEIK

SEQ ID NO: 680 - protein, 13 aa, Artificial Sequence
  synthetic sequence
GKIVPMFDAANYA

SEQ ID NO: 681 - protein, 12 aa, Artificial Sequence
  synthetic sequence
CARGPKWELDTW

SEQ ID NO: 682 - protein, 124 aa, Artificial Sequence
  synthetic sequence
QVQLVQSGAEVKKPGASVKVSCKASGYTFTGYYMHWVRQAPGQGLEWMGIINPSGGSTSYAQKFQGRVTMTRDTSTSTVYMELSSLRSEDTAVYYCAKTAGYDWLPSGLGMDVWGQGTTVTVSS

SEQ ID NO: 683 - protein, 107 aa, Artificial Sequence
  synthetic sequence
DIQMTQSPSSLSASVGDRVTITCRASQSINSWLAWYQQKPGKAPKLLIYYASSLQSGVPSRFSGSGSGTDFTLTISSLQPEDFATYYCQQGYSVPLSFGQGTKLEIK

SEQ ID NO: 684 - protein, 19 aa, Artificial Sequence
  synthetic sequence
CAKTAGYDWLPSGLGMDVW

SEQ ID NO: 685 - protein, 11 aa, Artificial Sequence
  synthetic sequence
RASQSINSWLA

SEQ ID NO: 686 - protein, 9 aa, Artificial Sequence
  synthetic sequence
QQGYSVPLS

SEQ ID NO: 687 - protein, 118 aa, Artificial Sequence
  synthetic sequence
QVQLVQSGAEVKKPGSSVKVSCKASGYTFSNYGITWVRQAPGQGLEWMGGIIPIFGSTASYAQKFQGRVTITADESTSTAYMELSSLRSEDTAVYYCARWRSDAFDIWGQGTMVTVSS

SEQ ID NO: 688 - protein, 107 aa, Artificial Sequence
  synthetic sequence
DIQMTQSPSSLSASVGDRVTITCRASQGISNWLAWYQQKPGKAPKLLIYDASNLETGVPSRFSGSGSGTDFTLTISSLQPEDFATYYCQQSYSTPLTFGGGTKVEIK

SEQ ID NO: 689 - protein, 9 aa, Artificial Sequence
  synthetic sequence
YTFSNYGIT

SEQ ID NO: 690 - protein, 14 aa, Artificial Sequence
  synthetic sequence
GGIIPIFGSTASYA

SEQ ID NO: 691 - protein, 12 aa, Artificial Sequence
  synthetic sequence
CARWRSDAFDIW

SEQ ID NO: 692 - protein, 120 aa, Artificial Sequence
  synthetic sequence
QVQLVQSGAEVKKPGASVKVSCKASGGTFSTYAISWVRQAPGQGLEWMGWINPNSGGTNYAQKFQGRVTMTRDTSTSIVYMELSSLRSEDTAVYYCARVNYDFYYGMDVWGQGTTVTVSS

SEQ ID NO: 693 - protein, 107 aa, Artificial Sequence
  synthetic sequence
DIQMTQSPSSLSASVGDRVTITCRASQGIRNDLGWYQQKPGKAPKLLIYRASTLNSGVPSRFSGSGSGTDFTLTISSLQPEDFATYYCQQSYSTPFTFGPGTKVDIK

SEQ ID NO: 694 - protein, 9 aa, Artificial Sequence
  synthetic sequence
GTFSTYAIS

SEQ ID NO: 695 - protein, 15 aa, Artificial Sequence
  synthetic sequence
CARVNYDFYYGMDVW

SEQ ID NO: 696 - protein, 11 aa, Artificial Sequence
  synthetic sequence
RASQGIRNDLG

SEQ ID NO: 697 - protein, 5 aa, Artificial Sequence
  synthetic sequence
STLNS

SEQ ID NO: 698 - protein, 120 aa, Artificial Sequence
  synthetic sequence
QVQLVQSGAEVKKPGASVKVSCKASGGTFSTYAISWVRQAPGQGLEWMGWINPNSGGTNYAQKFQGRVTMTRDTSTSTVYMELSSLRSEDTAVYYCARVNYDFYYGMDVWGQGTTVTVSS

SEQ ID NO: 699 - protein, 118 aa, Artificial Sequence
  synthetic sequence
EVQLLESGGGLVQPGGSLRLSCAASGFSFSSYDMSWVRQAPGKGLEWVSGISGSGSSTYYADSVKGRFTISRDNSKNTLYLQMNSLRAEDTAVYYCASPYGMGYMDVWGKGTTVTVSS

SEQ ID NO: 700 - protein, 107 aa, Artificial Sequence
  synthetic sequence
DIQMTQSPSSLSASVGDRVTITCRASQDIANYLAWYQQKPGKAPKLLIYGASSVQTGVPSRFSGSGSGTDFTLTISSLQPEDFATYYCQQSYTTPYTFGQGTRLEIK

SEQ ID NO: 701 - protein, 9 aa, Artificial Sequence
  synthetic sequence
FSFSSYDMS

SEQ ID NO: 702 - protein, 13 aa, Artificial Sequence
  synthetic sequence
SGISGSGSSTYYA

SEQ ID NO: 703 - protein, 13 aa, Artificial Sequence
  synthetic sequence
CASPYGMGYMDVW

SEQ ID NO: 704 - protein, 11 aa, Artificial Sequence
  synthetic sequence
RASQDIANYLA

SEQ ID NO: 705 - protein, 5 aa, Artificial Sequence
  synthetic sequence
SSVQT

SEQ ID NO: 706 - protein, 9 aa, Artificial Sequence
  synthetic sequence
QQSYTTPYT

SEQ ID NO: 707 - protein, 120 aa, Artificial Sequence
  synthetic sequence
QVQLVQSGAEVKKPGASVKVSCKASGGSFNNYAISWVRQAPGQGLEWMGWINPNTGGTSYAQKFQGRVTMTRDTSTSTVYMELSSLRSEDTAVYYCARVSYGVGYYMDVWGKGTTVTVSS

SEQ ID NO: 708 - protein, 107 aa, Artificial Sequence
  synthetic sequence
DIQMTQSPSSLSASVGDRVTITCQASQDISRYLNWYQQKPGKAPKLLIYAASNLQSGVPSRFSGSGSGTDFTLTISSLQPEDFATYYCQQSYSTPFTFGPGTKVDIK

SEQ ID NO: 709 - protein, 9 aa, Artificial Sequence
  synthetic sequence
GSFNNYAIS

SEQ ID NO: 710 - protein, 13 aa, Artificial Sequence
  synthetic sequence
GWINPNTGGTSYA

SEQ ID NO: 711 - protein, 15 aa, Artificial Sequence
  synthetic sequence
CARVSYGVGYYMDVW

SEQ ID NO: 712 - protein, 11 aa, Artificial Sequence
  synthetic sequence
QASQDISRYLN

SEQ ID NO: 713 - protein, 107 aa, Artificial Sequence
  synthetic sequence
DIQMTQSPSSLSASVGDRVTITCQASQDISRYLNWYQQKPGKAPKLLIYAASNLQSGVPSRFSGSGSGTDSTLTISSLQPEDFATYYCQQSYSTPFTFGPGTKVDIK

SEQ ID NO: 714 - protein, 129 aa, Artificial Sequence
  synthetic sequence
QVQLVQSGAEVKKPGASVKVSCKASGYTFTDDYIHWVRQAPGQGLEWMGWMNTNSGNTGYAQKFQGRVTMTRDTSTSTVYMELSSLRSEDTAVYYCARGGSYSSGWYGRLDYYYGMDVWGQGTTVTVSS

SEQ ID NO: 715 - protein, 107 aa, Artificial Sequence
  synthetic sequence
DIQMTQSPSSLSASVGDRVTITCRASQGVGNALGWYQQKPGKAPKLLIYAASSLQSGVPSRFSGSGSGTDFTLTISSLQPEDFATYYCQQAYSFPWTFGQGTKLEIK

SEQ ID NO: 716 - protein, 9 aa, Artificial Sequence
  synthetic sequence
YTFTDDYIH

SEQ ID NO: 717 - protein, 13 aa, Artificial Sequence
  synthetic sequence
GWMNTNSGNTGYA

SEQ ID NO: 718 - protein, 24 aa, Artificial Sequence
  synthetic sequence
CARGGSYSSGWYGRLDYYYGMDVW

SEQ ID NO: 719 - protein, 11 aa, Artificial Sequence
  synthetic sequence
RASQGVGNALG

SEQ ID NO: 720 - protein, 113 aa, Artificial Sequence
  synthetic sequence
QVQLVQSGAEVKKPGASVKVSCKASGYTFTDYAMHWVRQAPGQGLEWMGWLNPNSGNTGYAPKFQGRVTMTRDTSTSTVYMELSSLRSEDTAVYYCAAGLFIWGQGTMVTVSS

SEQ ID NO: 721 - protein, 107 aa, Artificial Sequence
  synthetic sequence
DIQMTQSPSSLSASVGDRVTITCRASQSINRWLAWYQQKPGKAPKLLIYDASSLESGVPSRFSGSGSGTDFTLTISSLQPEDFATYYCQQSYSIPITFGQGTRLEIK

SEQ ID NO: 722 - protein, 9 aa, Artificial Sequence
  synthetic sequence
YTFTDYAMH

SEQ ID NO: 723 - protein, 13 aa, Artificial Sequence
  synthetic sequence
GWLNPNSGNTGYA

SEQ ID NO: 724 - protein, 8 aa, Artificial Sequence
  synthetic sequence
CAAGLFIW

SEQ ID NO: 725 - protein, 11 aa, Artificial Sequence
  synthetic sequence
RASQSINRWLA

SEQ ID NO: 726 - protein, 5 aa, Artificial Sequence
  synthetic sequence
SSLES

SEQ ID NO: 727 - protein, 9 aa, Artificial Sequence
  synthetic sequence
QQSYSIPIT

SEQ ID NO: 728 - protein, 120 aa, Artificial Sequence
  synthetic sequence
QVQLVQSGAEVKKPGSSVKVSCKASGGTFSSYAISWVRQAPGQGLEWMGGIIPGFGSPNYAPNFQGRVTITADESTSTAYMELSSLRSEDTAVYYCTTEYCSSTSCSDYWGQGTLVTVSS

SEQ ID NO: 729 - protein, 112 aa, Artificial Sequence
  synthetic sequence
DIVMTQSPLSLPVTPGEPASISCRSSQSLLHSNGYNYLDWYLQKPGQSPQLLIYQGSNRAPGVPDRFSGSGSGTDFTLKISRVEAEDVGVYYCMQALQTPLTFGQGTKVEIK

SEQ ID NO: 730 - protein, 13 aa, Artificial Sequence
  synthetic sequence
GGIIPGFGSPNYA

SEQ ID NO: 731 - protein, 15 aa, Artificial Sequence
  synthetic sequence
CTTEYCSSTSCSDYW

SEQ ID NO: 732 - protein, 5 aa, Artificial Sequence
  synthetic sequence
SNRAP

SEQ ID NO: 733 - protein, 9 aa, Artificial Sequence
  synthetic sequence
MQALQTPLT

SEQ ID NO: 734 - protein, 125 aa, Artificial Sequence
  synthetic sequence
QVQLVQSGAEVKKPGASVKVSCKASGYTFSDHYMHWVRQAPGQGLEWMGTINPSGGRTSYAQKFQGRVTMTRDTSTSTVYMELSSLRSEDTAVYYCAADNGHASGWLYYYGMDVWGQGTTVTVSS

SEQ ID NO: 735 - protein, 107 aa, Artificial Sequence
  synthetic sequence
DIQMTQSPSSLSASVGDRVTITCRASQSISNWVAWYQQKPGKAPKLLIYRASTLQSGVPSRFSGSGSGTDFTLTISSLQPEDFATYYCQQSHSLPLTFGPGTKVDIK

SEQ ID NO: 736 - protein, 9 aa, Artificial Sequence
  synthetic sequence
YTFSDHYMH

SEQ ID NO: 737 - protein, 13 aa, Artificial Sequence
  synthetic sequence
GTINPSGGRTSYA

SEQ ID NO: 738 - protein, 20 aa, Artificial Sequence
  synthetic sequence
CAADNGHASGWLYYYGMDVW

SEQ ID NO: 739 - protein, 11 aa, Artificial Sequence
  synthetic sequence
RASQSISNWVA

SEQ ID NO: 740 - protein, 9 aa, Artificial Sequence
  synthetic sequence
QQSHSLPLT

SEQ ID NO: 741 - protein, 116 aa, Artificial Sequence
  synthetic sequence
EVQLLESGGGLVQPGGSLRLSCAASGFTFSSYAMSWVRQAPGKGLEWVSGISGGGGTTYYADSVKGRFTISRDNSKNTLYLQMNSLRAEDTAVYYCASEYYGMDVWGQGTTVTVSS

SEQ ID NO: 742 - protein, 107 aa, Artificial Sequence
  synthetic sequence
DIQMTQSPSSLSASVGDRVTITCRASQSISGWLAWYQQKPGKAPKLLIYAASSLQSGVPSRFSGSGSGTDFTLTISSLQPEDFATYYCQQYRNFPYTFGQGTKLEIK

SEQ ID NO: 743 - protein, 13 aa, Artificial Sequence
  synthetic sequence
SGISGGGGTTYYA

SEQ ID NO: 744 - protein, 11 aa, Artificial Sequence
  synthetic sequence
CASEYYGMDVW

SEQ ID NO: 745 - protein, 11 aa, Artificial Sequence
  synthetic sequence
RASQSISGWLA

SEQ ID NO: 746 - protein, 9 aa, Artificial Sequence
  synthetic sequence
QQYRNFPYT

SEQ ID NO: 747 - protein, 113 aa, Artificial Sequence
  synthetic sequence
QVQLVQSGAEVKKPGASVKVSCKASGYTFSGYYMHWVRQAPGQGLEWMGVINPSGGSTSYAQKFQGRVTMTRDTSTSTVYMELSSLRSEDTAVYYCAEGFDYWGQGTLVTVSS

SEQ ID NO: 748 - protein, 107 aa, Artificial Sequence
  synthetic sequence
EIVMTQSPATLSVSPGERATLSCRASQGVGRSLAWYQQKPGQAPRLLIYGASTRATGIPARFSGSGSGTEFTLTISSLQSEDFAVYYCQQYYTTPITFGQGTRLEIK

SEQ ID NO: 749 - protein, 9 aa, Artificial Sequence
  synthetic sequence
YTFSGYYMH

SEQ ID NO: 750 - protein, 13 aa, Artificial Sequence
  synthetic sequence
GVINPSGGSTSYA

SEQ ID NO: 751 - protein, 8 aa, Artificial Sequence
  synthetic sequence
CAEGFDYW

SEQ ID NO: 752 - protein, 11 aa, Artificial Sequence
  synthetic sequence
RASQGVGRSLA

SEQ ID NO: 753 - protein, 9 aa, Artificial Sequence
  synthetic sequence
QQYYTTPIT

SEQ ID NO: 754 - protein, 120 aa, Artificial Sequence
  synthetic sequence
QVQLVQSGAEVKKPGASVKVSCKASGGTFSNYAISWVRQAPGQGLEWMGWMNPNSGNTGYAQKFQGRVTMTRDTSTSTVYMELSSLRSEDTAVYYCARVNYYYYYGMDVWGQGTTVTVSS

SEQ ID NO: 755 - protein, 107 aa, Artificial Sequence
  synthetic sequence
DIQMTQSPSSLSASVGDRVTITCQASQDISNYLNWYQQKPGKAPKLLIYKASTLKSGVPSRFSGSGSGTDFTLTISSLQPEDFATYYCQQADNLPFTFGPGTKVDIK

SEQ ID NO: 756 - protein, 9 aa, Artificial Sequence
  synthetic sequence
GTFSNYAIS

SEQ ID NO: 757 - protein, 15 aa, Artificial Sequence
  synthetic sequence
CARVNYYYYYGMDVW

SEQ ID NO: 758 - protein, 5 aa, Artificial Sequence
  synthetic sequence
STLKS

SEQ ID NO: 759 - protein, 9 aa, Artificial Sequence
  synthetic sequence
QQADNLPFT

SEQ ID NO: 760 - protein, 122 aa, Artificial Sequence
  synthetic sequence
QVQLVQSGAEVKKPGASVKVSCKASGYTFTNYYMHWVRQAPGQGLEWMGIINPSGGSTSYAQRFQGRVTMTRDTSTSTVYMELSSLRSEDTAVYYCARDWGWDYYYYGMDVWGQGTTVTVSS

SEQ ID NO: 761 - protein, 107 aa, Artificial Sequence
  synthetic sequence
DIQMTQSPSSLSASVGDRVTITCQASRDISNYLNWYQQKPGKAPKLLIYAASSLQSGVPSRFSGSGSGTDFTLTISSLQPEDFATYYCQQANSFPPTFGQGTKLEIK

SEQ ID NO: 762 - protein, 17 aa, Artificial Sequence
  synthetic sequence
CARDWGWDYYYYGMDVW

SEQ ID NO: 763 - protein, 11 aa, Artificial Sequence
  synthetic sequence
QASRDISNYLN

SEQ ID NO: 764 - protein, 9 aa, Artificial Sequence
  synthetic sequence
QQANSFPPT

SEQ ID NO: 765 - protein, 119 aa, Artificial Sequence
  synthetic sequence
EVQLLESGGGLVQPGGSLRLSCAASGFTFSNSDMSWVRQAPGKGLEWVSGITISGGSTYYADSVRGRFTISRDNSKNTLYLQMSSLRAEDTAVYYCARGRGGSGWLDYWGQGTLVTVSS

SEQ ID NO: 766 - protein, 113 aa, Artificial Sequence
  synthetic sequence
DIVMTQSPDSLAVSLGERATINCKSSQSVLYSPNNKNYLAWYQQKPGQPPKLLIYWASTRESGVPDRFSGSGSGTDFTLTISSLQAEDVAVYYCQQYYTTPPTFGQGTRLEIK

SEQ ID NO: 767 - protein, 9 aa, Artificial Sequence
  synthetic sequence
FTFSNSDMS

SEQ ID NO: 768 - protein, 13 aa, Artificial Sequence
  synthetic sequence
SGITISGGSTYYA

SEQ ID NO: 769 - protein, 14 aa, Artificial Sequence
  synthetic sequence
CARGRGGSGWLDYW

SEQ ID NO: 770 - protein, 17 aa, Artificial Sequence
  synthetic sequence
KSSQSVLYSPNNKNYLA

SEQ ID NO: 771 - protein, 9 aa, Artificial Sequence
  synthetic sequence
QQYYTTPPT

SEQ ID NO: 772 - protein, 107 aa, Artificial Sequence
  synthetic sequence
DIQMTQSPSSLSASVGDRVTITCRASQSISRWLAWYQQKPGKAPKLLIYGASSLQSGVPSRFSGSGSGTDFTLTISSLQPEDFATYYCQQANSFPVTFGGGTKVDIK

SEQ ID NO: 773 - protein, 107 aa, Artificial Sequence
  synthetic sequence
DIQMTQSPSSLSASVGDRVTITCRASQSISRWLAWYQQKPGKAPKLLIYGASSLQSGVPSRFSGSGSGTDFTFTISSLQPEDFATYYCQQANSFPVTFGGGTKVDIK

SEQ ID NO: 774 - protein, 120 aa, Artificial Sequence
  synthetic sequence
QVQLVQSGAEVKKPGSSVKVSCKASGGDFSNYFVSWVRQAPGQGLEWMGWINPHNGDTMYAQKFQGRVTITADESTSTAYMELSSLRSEDTAVYYCARGGYSYGYTFDIWGQGTMVTVSS

SEQ ID NO: 775 - protein, 107 aa, Artificial Sequence
  synthetic sequence
DIQMTQSPSSLSASVGDRVTITCRASQSISTWLAWYQQKPGKAPKLLIYAASTLQSGVPSRFSGSGSGTDFTLTISSLQPEDFATYYCQQSYSTPFTFGGGTKVEIK

SEQ ID NO: 776 - protein, 9 aa, Artificial Sequence
  synthetic sequence
GDFSNYFVS

SEQ ID NO: 777 - protein, 13 aa, Artificial Sequence
  synthetic sequence
GWINPHNGDTMYA

SEQ ID NO: 778 - protein, 15 aa, Artificial Sequence
  synthetic sequence
CARGGYSYGYTFDIW

SEQ ID NO: 779 - protein, 119 aa, Artificial Sequence
  synthetic sequence
EVQLLESGGGLVQPGGSLRLSCAASGFTFSNSDMSWVRQAPGKGLEWVSGITISGGSTYYADSVKGRFTISRDNSKNTLYLQMNSLRAEDTAVYYCARGRGGSGWLDYWGQGTLVTVSS

SEQ ID NO: 780 - protein, 113 aa, Artificial Sequence
  synthetic sequence
DIVMTQSPDSLAVSLGERATINCKSSQSVLYSPNNKNYLAWYQQKPGQPPKLLIYWASTRESGVPDRFSGSGSGTDFTLTISSLQAEDVAVYYCQQYYITPPTFGQGTRLEIK

SEQ ID NO: 781 - protein, 9 aa, Artificial Sequence
  synthetic sequence
QQYYITPPT

SEQ ID NO: 782 - protein, 113 aa, Artificial Sequence
  synthetic sequence
QVQLVQSGAEVKKPGSSVKVSCKASGHTFTDYYMHWVRQAPGQGLEWMGIINPSGGSTSYAQKFQGRVTITADESTSTAYMELSSLRSEDTAVYYCASGWTDWGQGTLVTVSS

SEQ ID NO: 783 - protein, 108 aa, Artificial Sequence
  synthetic sequence
EIVMTQSPATLSVSPGERATLSCRASQSVSSYLAWYQQKPGQAPRLLIYGTSSRATGIPARFSGSGSGTEFTLTISSLQSEDFAVYYCQQYTTSPITFGQGTRLEIKR

SEQ ID NO: 784 - protein, 9 aa, Artificial Sequence
  synthetic sequence
HTFTDYYMH

SEQ ID NO: 785 - protein, 8 aa, Artificial Sequence
  synthetic sequence
CASGWTDW

SEQ ID NO: 786 - protein, 11 aa, Artificial Sequence
  synthetic sequence
RASQSVSSYLA

SEQ ID NO: 787 - protein, 5 aa, Artificial Sequence
  synthetic sequence
SSRAT

SEQ ID NO: 788 - protein, 9 aa, Artificial Sequence
  synthetic sequence
QQYTTSPIT

SEQ ID NO: 789 - protein, 117 aa, Artificial Sequence
  synthetic sequence
QVQLVQSGAEVKKPGASVKVSCKASGYTFTDYYMHWVRQAPGQGLEWMGGIFPVFGSSTYAQKFQGRVTMTRDTSTSTVYMELSSLRSEDTAVYYCARDHGSGLDVWGQGTTVTVSS

SEQ ID NO: 790 - protein, 107 aa, Artificial Sequence
  synthetic sequence
DIQMTQSPSSLSASVGDRVTITCQASQDISNYLNWYQQKPGKAPKLLIYDAKDLHPGVPSRFSGSGSGTDFTLTISSLQPEDFATYYCQESFSTLTFGQGTKVEIKR

SEQ ID NO: 791 - protein, 9 aa, Artificial Sequence
  synthetic sequence
YTFTDYYMH

SEQ ID NO: 792 - protein, 13 aa, Artificial Sequence
  synthetic sequence
GGIFPVFGSSTYA

SEQ ID NO: 793 - protein, 12 aa, Artificial Sequence
  synthetic sequence
CARDHGSGLDVW

SEQ ID NO: 794 - protein, 5 aa, Artificial Sequence
  synthetic sequence
KDLHP

SEQ ID NO: 795 - protein, 8 aa, Artificial Sequence
  synthetic sequence
QESFSTLT

SEQ ID NO: 796 - protein, 113 aa, Artificial Sequence
  synthetic sequence
QVQLVQSGAEVKKPGASVKVSCKASGYSFTTYYMHWVRQAPGQGLEWMGIIAPSGGSTSYAQKFQGRVTMTRDTSTSTVYMELSSLRSEDTAVYYCASGWVYWGQGTLVTVSS

SEQ ID NO: 797 - protein, 13 aa, Artificial Sequence
  synthetic sequence
GIIAPSGGSTSYA

SEQ ID NO: 798 - protein, 113 aa, Artificial Sequence
  synthetic sequence
QVQLVQSGAEVKKPGASVKVSCKASGYSFTTYYMHWVRQAPGQGLEWMGIIGPSGGSTSYAQKFQGRVTMTRDTSTSTVYMELSSLRSEDTAVYYCASGWVYWGQGTLVTVSS

SEQ ID NO: 799 - protein, 125 aa, Artificial Sequence
  synthetic sequence
QVQLVQSGAEVKKPGASVKVSCKASGYTFSDHYMHWVRQAPGQGLEWMGTIAPSGGRTSYAQKFQGRVTMTRDTSTSTVYMELSSLRSEDTAVYYCAADNGHASGWLYYYGMDVWGQGTTVTVSS

SEQ ID NO: 800 - protein, 13 aa, Artificial Sequence
  synthetic sequence
GTIAPSGGRTSYA

SEQ ID NO: 801 - protein, 125 aa, Artificial Sequence
  synthetic sequence
QVQLVQSGAEVKKPGASVKVSCKASGYTFSDHYMHWVRQAPGQGLEWMGTIGPSGGRTSYAQKFQGRVTMTRDTSTSTVYMELSSLRSEDTAVYYCAADNGHASGWLYYYGMDVWGQGTTVTVSS

SEQ ID NO: 802 - protein, 10 aa, Artificial Sequence
  synthetic sequence
GGGGSGGGGS

SEQ ID NO: 803 - protein, 8 aa, Artificial Sequence
  synthetic sequence
QQTYSGWT

SEQ ID NO: 804 - protein, 107 aa, Artificial Sequence
  synthetic sequence
DIQMTQSPSSLSASVGDRVTITCRASQSIGRWLAWYQQKPGKAPKLLIYDASNLQSGVPSRFSGSGSGTDFTLTISSLQPEDFATYYCQQSYSIPITFGQGTKVEIK

1. A polypeptide comprising a skin targeting moiety or an intestine target moiety that binds to a target cell in the skin or the intestine and an effector binding/modulating moiety, wherein the effector binding/modulating moiety is a PD-1 agonist or an IL-2 mutein polypeptide (IL-2 mutein), wherein the IL-2 mutein comprises the sequence of SEQ ID NO: 60, wherein at least one of X₁, X₂, X₃, and X₄ is I and the remainder are L or I.

2. The polypeptide of claim 1, wherein the targeting moiety comprises an antibody that binds to a target protein on the surface of the skin cell.

3. The polypeptide of claim 2, wherein the antibody is an antibody that binds to a desmoglein protein.

4. The polypeptide of claim 1, wherein the IL-2 mutein binds to a receptor expressed by an immune cell.

5. The polypeptide of claim 4, wherein the immune cell contributes to an unwanted immune response.

6. The polypeptide of claim 4, wherein the immune cell causes a disease pathology.

7. The polypeptide of claim 1, wherein the targeting moiety comprises an anti-desmoglein 1 antibody, an anti-desmoglein 2 antibody, an anti-desmoglein 3 antibody, or an anti-desmoglein 4 antibody.

8.-41. (canceled)

42. A polypeptide comprising a skin targeting moiety or an intestine target moiety that binds to a target cell in the skin or the intestine and an effector binding/modulating moiety, wherein the effector binding/modulating moiety is a PD-1 agonist or an IL-2 mutein polypeptide (IL-2 mutein), wherein the IL-2 mutein comprises the sequence of SEQ ID NO: 60, wherein at least one of the amino acids at position 53, 56, 80 or 118 is I and the remainder are L or I, wherein the polypeptide comprises a first chain and a second chain, wherein
the first chain comprises:
V_{H}-H_{c}-Linker-C₁, wherein V_{H} is a variable heavy domain that binds to the target cell with a V_{L} domain of the second chain; H_{c} is a heavy chain of antibody comprising CH1-CH2-CH3 domain, the Linker is a glycine/serine linker, and C₁ is an IL-2 mutein fused to a Fc protein in either the N-terminal or C-terminal orientation; and
the second chain comprises:
V_{L}-L_{c}, wherein V_{L} is a variable light chain domain that binds to the target cell with the V_{H} domain of the first chain, and the L_{c} domain is a light chain CK domain.

43. The polypeptide of claim 42, wherein the V_{L} and V_{H} domain are anti-desmoglein 1, 2, 3, or 4 variable domains that bind to desmoglein 1, 2, 3, or 4 expressed on a cell.

44. (canceled)

45. (canceled)

46. The polypeptide of claim 42, wherein the IL-2 mutein further comprises a mutation at a position that corresponds to position 69, 75, 88, or 125, or any combination thereof.

47. The polypeptide of claim 42, wherein the IL-2 mutein comprises a mutation selected from the group consisting of: at one of L53I, L56I, L80I, and L118I and the mutations of V69A, Q74P, N88D or N88R, and optionally C125A or C125S.

48. The polypeptide of claim 47, wherein the IL-2 mutein comprises a L53I mutation.

49. The polypeptide of claim 47, wherein the IL-2 mutein comprises a L56I mutation.

50. The polypeptide of claim 47, wherein the IL-2 mutein comprises a L80I mutation.

51. The polypeptide of claim 47, wherein the IL-2 mutein comprises a L118I mutation.

52. The polypeptide of claim 42, wherein the IL-2 mutein does not comprises any other mutations.

53. The polypeptide of claim 42, wherein the Fc protein comprises L247A, L248A, and G250A mutations, or a L234A mutation, a L235A mutation, and/or a G237A mutation according to Kabat numbering.

54. The polypeptide of claim 42, wherein the Linker comprises a sequence of GGGGSGGGGSGGGGS (SEQ ID NO: 30) or GGGGSGGGGSGGGGSGGGGS (SEQ ID NO: 22).

55.-58. (canceled)

59. A method of treating a subject with inflammatory bowel disease, GVHD, a skin auto-immune disorder as provided herein, the method comprising administering a polypeptide of claim 1 to the subject to treat the inflammatory bowel disease.

60. The method of claim 59, wherein the subject with inflammatory bowel disease has Crohn's disease.

61. The method of claim 59, wherein the subject with inflammatory bowel disease has ulcerative colitis.

62.-102. (canceled)
